(19) United States
(12) Patent Application Publication
(10) Pub. No.: US 2002/0023280 A1
(43) Pub. Date: Feb. 21, 2002

(54) Expressed sequences of arabidopsis thaliana

(76) Inventors: Jorn Gorlach, Durham, NC (US); Yong-Qiang An, San Diego, CA (US); Carol M. Hamilton, Apex, NC (US); Jennifer L. Price, Raleigh, NC (US); Tracy M. Raines, Durham, NC (US); Yang Yu, Martinsville, NJ (US); Joshua G. Rameaka, Durham, NC (US); Amy Page, Durham, NC (US); Abraham V. Mathew, Cary, NC (US); Brooke L. Ledford, Holly Springs, NC (US); Jeffrey P. Woessner, Hillsborough, NC (US); William David Haas, Durham, NC (US); Carlos A. Garcia, Carrboro, NC (US); Maja Kricker, Pittsboro, NC (US); Ted Slater, Apex, NC (US); Keith R. Davis, Durham, NC (US); Keith Allen, Cary, NC (US); Neil Hoffman, Chapel Hill, NC (US); Patrick Hurban, Raleigh, NC (US)

Correspondence Address: PARADIGM GENETICS, INC, 104 ALEXANDER DRIVE, BUILDING 2, P O BOX 14528, RTP, NC, 277094528

(21) Appl. No.: 09/770,444

(22) Filed: Jan. 26, 2001

Related U.S. Application Data
(60) Provisional application No. 60/178,502, filed on Jan. 27, 2000.

(51) Int. Cl. A01H 5/00; C12Q 1/00; C07H 21/04

(52) U.S. Cl. 800/288; 435/4; 536/23.2; 536/23.6

(57) ABSTRACT

Isolated nucleotide compositions and sequences are provided for Arabidopsis thaliana genes. The nucleic acid compositions find use in identifying homologous or related genes; in producing compositions that modulate the expression or function of its encoded protein, mapping functional regions of the protein; and in studying associated physiological pathways. The genetic sequences may also be used for the genetic manipulation of cells, particularly of plant cells. The encoded gene products and modified organisms are useful for screening of biologically active agents, e.g. fungicides, insecticides, etc.; for elucidating biochemical pathways; and the like.

### CROSS-REFERENCE TO RELATED APPLICATION

[0001] This application claims the benefit of U.S. Provisional Application 60/178,502 Filed Jan. 27, 2000.

### FIELD OF INVENTION

[0002] The invention is in the field of polynucleotide sequences of a plant, particularly sequences expressed in arabidopsis thaliana.

### BACKGROUND OF THE INVENTION

[0003] Plants and plant products have vast commercial importance in a wide variety of areas including food crops for human and animal consumption, flavor enhancers for food, and production of specialty chemicals for use in products such as medicaments and fragrances. In considering food crops for humans and livestock, genes such as those involved in a plants resistance to insects, plant viruses, and fungi; genes involved in pollination; and genes whose products enhance the nutritional value of the food, are of major importance. A number of such genes have been described, see, for example, McCaskill and Croteau (1999) Nature Biotechnol. 17:31-36.

[0004] Despite recent advances in methods for identification, cloning, and characterization of genes, much remains to be learned about plant physiology in general, including how plants produce many of the above-mentioned products; mechanisms for resistance to herbicides, insects, plant viruses, fungi; elucidation of genes involved in specific biosynthetic pathways; and genes involved in environmental tolerance, e.g., salt tolerance, drought tolerance, or tolerance to anaerobic conditions.

[0005] Arabidopsis thaliana is a model system for genetic, molecular and biochemical studies of higher plants. Features of this plant that make it a model system for genetic and molecular biology research include a small genome size, organized into five chromosomes and containing an estimated 20,000 genes, a rapid life cycle, prolific seed production and, since it is small, it can easily be cultivation in limited space. A. thaliana is a member of the mustard family (Brassicaceae) with a broad natural distribution throughout Europe, Asia, and North America. Many different ecotypes have been collected from natural populations and are available for experimental analysis. The entire life cycle, including seed germination, formation of a rosette plant, bolting of the main stem, flowering, and maturation of the first seeds, is completed in 6 weeks. A large number of mutant lines are available that affect nearly all aspects of its growth. These features greatly facilitate the isolation of fundamentally interesting and potentially important genes for agronomic development

[0006] Most gene products from higher plants exhibit adequate sequence similarity to deduced amino acid sequences of other plant genes to permit assignment of probable gene function, if it is known, in any higher plant. It is likely that there will be very few protein-encoding angiosperm genes that do not have orthologs or paralogs in Arabidopsis. The developmental diversity of higher plants may be largely due to changes in the cis-regulatory sequences of transcriptional regulators and not in coding sequences.

[0007] Many advances reported over the past few years offer clear evidence that this plant is not only a very important model species for basic research, but also extremely valuable for applied plant scientists and plant breeders. Knowledge gained from Arabidopsis can be used directly to develop desired traits in plants of other species.

### Relevant Literature

[0008] Cold Spring Harbor Monograph 27 (1994) E. M. Meyerowitz and C. R. Somerville, eds. (CSH Laboratory Press). Annual Plant Reviews, Vol. 1: Arabidopsis (1998) M. Anderson and J. A. Roberts, eds. (CRC Press). Methods in Molecular Biology: Arabidopsis Protocols, Vol. 82 (1997) J. M. Martinez-Zapater and J. Salinas, eds. (CRC Press).

[0009] Mayer et al (1999) Nature 402(6763):769-77; “Sequence and analysis of chromosome 4 of the plant Arabidopsis thaliana”. Lin et al. (1999) 402(6763):761-8, “Sequence and analysis of chromosome 2 of the plant Arabidopsis thaliana”. Meinke et al. (1998) Science 282:662-682, “Arabidopsis thaliana: a model plant for genome analysis”. Somerville and Somerville (1999) Science 285:380-383, “Plant functional genomics”. Mozo et al. (1999) Nat. Genet. 22:271-275, “A complete BAC-based physical map of the Arabidopsis thaliana genome.”

### SUMMARY OF THE INVENTION

[0010] Novel nucleic acid sequences of Arabidopsis thaliana, their encoded polypeptides and variants thereof, genes corresponding to these nucleic acids, and proteins expressed by the genes, are provided.

[0011] The invention also provides diagnostic, prophylactic and therapeutic agents employing such novel nucleic acids, their corresponding genes or gene products, including expression constructs, probes, antisense constructs, and the like. The genetic sequences may also be used for the genetic manipulation of plant cells, particularly dicotyledonous plants. The encoded gene products and modified organisms are useful for introducing or improving disease resistance and stress tolerance into plants; screening of biologically active agents, e.g. fungicides, etc.; for elucidating biochemical pathways; and the like.

[0012] In one embodiment of the invention, a nucleic acid is provided that comprises a start codon; an optional intervening sequence; a coding sequence capable of hybridizing under stringent conditions as set forth in SEQ ID NO:1 to 999; and an optional terminal sequence, wherein at least one of said optional sequences is present. Such a nucleic acid may correspond to naturally occurring Arabidopsis expressed sequences.

### DETAILED DESCRIPTION OF THE INVENTION

[0013] Novel nucleic acid sequences from Arabidopsis thaliana, their encoded polypeptides and variants thereof, genes corresponding to these nucleic acids and proteins expressed by the genes are provided. The invention also provides agents employing such novel nucleic acids, their corresponding genes or gene products, including expression constructs, probes, antisense constructs, and the like. The nucleotide sequences are provided in the attached SEQLIST.

[0014] Sequences include, but are not limited to, sequences that encode resistance proteins; sequences that encode tolerance factors; sequences encoding proteins or other factors that are involved, directly or indirectly in biochemical pathways such as metabolic or biosynthetic pathways, sequences involved in signal transduction, sequences involved in the regulation of gene expression, structural genes, and the like. Biosynthetic pathways of interest include, but are not limited to, biosynthetic pathways whose product (which may be an end product or an intermediate) is of commercial, nutritional, or medicinal value.

[0015] The sequences may be used in screening assays of various plant strains to determine the strains that are best capable of withstanding a particular disease or environmental stress. Sequences encoding activators and resistance proteins may be introduced into plants that are deficient in these sequences. Alternatively, the sequences may be introduced under the control of promoters that are convenient for induction of expression. The protein products may be used in screening programs for insecticides, fungicides and antibiotics to determine agents that mimic or enhance the resistance proteins. Such agents may be used in improved methods of treating crops to prevent or treat disease. The protein products may also be used in screening programs to identify agents which mimic or enhance the action of tolerance factors. Such agents may be used in improved methods of treating crops to enhance their tolerance to environmental stresses.

[0016] Still other embodiments of the invention provide methods for enhancing or inhibiting production of a biosynthetic product in a plant by introducing a nucleic acid of the invention into a plant cell, where the nucleic acid comprises sequences encoding a factor which is involved, directly or indirectly in a biosynthetic pathway whose products are of commercial, nutritional, or medicinal value include any factor, usually a protein or peptide, which regulates such a biosynthetic pathway; which is an intermediate in such a biosynthetic pathway; or which in itself is a product that increases the nutritional value of a food product; or which is a medicinal product; or which is any product of commercial value.

[0017] Transgenic plants containing the antisense nucleic acids of the invention are useful for identifying other mediators that may induce expression of proteins of interest; for establishing the extent to which any specific insect and/or pathogen is responsible for damage of a particular plant; for identifying other mediators that may enhance or induce tolerance to environmental stress; for identifying factors involved in biosynthetic pathways of nutritional, commercial, or medicinal value; or for identifying products of nutritional, commercial, or medicinal value.

[0018] In still other embodiments, the invention provides transgenic plants constructed by introducing a subject nucleic acid of the invention into a plant cell, and growing the cell into a callus and then into a plant; or, alternatively by breeding a transgenic plant from the subject process with a second plant to form an F1 or higher hybrid. The subject transgenic plants and progeny are used as crops for their enhanced disease resistance, enhanced traits of interest, for example size or flavor of fruit, length of growth cycle, etc., or for screening programs, e.g. to determine more effective insecticides, etc; used as crops which exhibit enhanced tolerance environmental stress; or used to produce a factor.

[0019] Those skilled in the art will recognize the agricultural advantages inherent in plants constructed to have either increased or decreased expression of resistance proteins; or increased or decreased tolerance to environmental factors; or which produce or over-produce one or more factors involved in a biosynthetic pathway whose product is of commercial, nutritional, or medicinal value. For example, such plants may have increased resistance to attack by predators, insects, pathogens, microorganisms, herbivores, mechanical damage and the like; may be more tolerant to environmental stress, e.g. may be better able to withstand drought conditions, freezing, and the like; or may produce a product not normally made in the plant, or may produce a product in higher than normal amounts, where the product has commercial, nutritional, or medicinal value. Plants which may be useful include dicotyledons and monocotyledons. Representative examples of plants in which the provided sequences may be useful include tomato, potato, tobacco, cotton, soybean, alfalfa, rape, and the like. Monocotyledons, more particularly grasses (Poaceae family) of interest, include, without limitation, Avena sativa (oat); Avena strigosa (black oat); Elymus (wild rye); Hordeum sp. including Hordeum vulgare (barley); Oryza sp., including Oryza glaberrima (African rice); Oryza longistaminata (long-staminate rice); Pennisetum americanum (pearl millet); Sorghum sp. (sorghum); Triticum sp., including Triticum aestivum (common wheat); Triticum durum (durum wheat); Zea mays (corn); etc.

### NUCLEIC ACID COMPOSITIONS

[0020] The following detailed description describes the nucleic acid compositions encompassed by the invention, methods for obtaining cDNA or genomic DNA encoding a full-length gene product, expression of these nucleic acids and genes; identification of structural motifs of the nucleic acids and genes; identification of the function of a gene product encoded by a gene corresponding to a nucleic acid of the invention; use of the provided nucleic acids as probes, in mapping, and in diagnosis; use of the corresponding polypeptides and other gene products to raise antibodies; use of the nucleic acids in genetic modification of plant and other species; and use of the nucleic acids, their encoded gene products, and modified organisms, for screening and diagnostic purposes.

[0021] The scope of the invention with respect to nucleic acid compositions includes, but is not necessarily limited to, nucleic acids having a sequence set forth in any one of SEQ ID NOS:1-999; nucleic acids that hybridize the provided sequences under stringent conditions; genes corresponding to the provided nucleic acids; variants of the provided nucleic acids and their corresponding genes, particularly those variants that retain a biological activity of the encoded gene product.

[0022] In one embodiment, the sequences of the invention provide a polypeptide coding sequence. The polypeptide coding sequence may correspond to a naturally expressed mRNA in Arabidopsis or other species, or may encode a fusion protein between one of the provided sequences and an exogenous protein coding sequence. The coding sequence is characterized by an ATG start codon, a lack of stop codons in-frame with the ATG, and a termination codon, that is, a continuous open frame is provided between the start and the stop codon. The sequence contained between the start and the stop codon will comprise a sequence capable of hybridizing under stringent conditions to a sequence set for in SEQ ID NO:1-999, and may comprise the sequence set forth in the Seqlist.

[0023] Other nucleic acid compositions contemplated by and within the scope of the present invention will be readily apparent to one of ordinary skill in the art when provided with the disclosure here.

[0024] The invention features nucleic acids that are derived from Arabidopsis thaliana. Novel nucleic acid compositions of the invention of particular interest comprise a sequence set forth in any one of SEQ ID NOS:1-999 or an identifying sequence thereof. An “identifying sequence” is a contiguous sequence of residues at least about 10 nt to about 20 nt in length, usually at least about 50 nt to about 100 nt in length, that uniquely identifies a nucleic acid sequence, e.g., exhibits less than 90%, usually less than about 80% to about 85% sequence identity to any contiguous nucleotide sequence of more than about 20 nt. Thus, the subject novel nucleic acid compositions include full length cDNAs or mRNAs that encompass an identifying sequence of contiguous nucleotides from any one of SEQ ID NOS:1-999.

[0025] The nucleic acids of the invention also include nucleic acids having sequence similarity or sequence identity. Nucleic acids having sequence similarity are detected by hybridization under low stringency conditions, for example, at 50° C. and 10XSSC (0.9 M NaCl/0.09 M sodium citrate) and remain bound when subjected to washing at 55° C. in 1XSSC. Sequence identity can be determined by hybridization under stringent conditions, for example, at 50° C. or higher and 0.1XSSC (9 mM NaCl/0.9 mM sodium citrate). Hybridization methods and conditions are well known in the art, see U.S. Pat. No. 5,707,829. Nucleic acids that are substantially identical to the provided nucleic acid sequences, e.g. allelic variants, genetically altered versions of the gene, etc., bind to the provided nucleic acid sequences (SEQ ID NOS:1-999) under stringent hybridization conditions. By using probes, particularly labeled probes of DNA sequences, one can isolate homologous or related genes. The source of homologous genes can be any species, particularly grasses as previously described.

[0026] Preferably, hybridization is performed using at least 15 contiguous nucleotides of at least one of SEQ ID NOS:1-999. The probe will preferentially hybridize with a nucleic acid or mRNA comprising the complementary sequence, allowing the identification and retrieval of the nucleic acids of the biological material that uniquely hybridize to the selected probe. Probes of more than 15 nucleotides can be used, e.g. probes of from about 18 nucleotides up to the entire length of the provided nucleic acid sequences, but 15 nucleotides generally represents sufficient sequence for unique identification.

[0027] The nucleic acids of the invention also include naturally occurring variants of the nucleotide sequences, e.g. degenerate variants, allelic variants, etc. Variants of the nucleic acids of the invention are identified by hybridization of putative variants with nucleotide sequences disclosed herein, preferably by hybridization under stringent conditions For example, by using appropriate wash conditions, variants of the nucleic acids of the invention can be identified where the allelic variant exhibits at most about 25-30% base pair mismatches relative to the selected nucleic acid probe. In general, allelic variants contain 5-25% base pair mismatches, and can contain as little as even 2-5%, or 1-2% base pair mismatches, as well as a single base-pair mismatch.

[0028] The invention also encompasses homologs corresponding to the nucleic acids of SEQ ID NOS:1-999, where the source of homologous genes can be any related species, usually within the same genus or group. Homologs have substantial sequence similarity, e.g. at least 75% sequence identity, usually at least 90%, more usually at least 95% between nucleotide sequences. Sequence similarity is calculated based on a reference sequence, which may be a subset of a larger sequence, such as a conserved motif, coding region, flanking region, etc. A reference sequence will usually be at least about 18 contiguous nt long, more usually at least about 30 nt long, and may extend to the complete sequence that is being compared. Algorithms for sequence analysis are known in the art, such as BLAST, described in Altschul et al., J. Mol. Biol. (1990) 215:403-10.

[0029] In general, variants of the invention have a sequence identity greater than at least about 65%, preferably at least about 75%, more preferably at least about 85%, and can be greater than at least about 90% or more as determined by the Smith-Waterman homology search algorithm as implemented in MPSRCH program (Oxford Molecular). For the purposes of this invention, a preferred method of calculating percent identity is the Smith-Waterman algorithm, using the following. Global DNA sequence identity must be greater than 65% as determined by the Smith-Wateman homology search algorithm as implemented in MPSRCH program (Oxford Molecular) using an affine gap search with the following search parameters: gap open penalty, 12; and gap extention penalty, 1.

[0030] The subject nucleic acids can be cDNAs or genomic DNAs, as well as fragments thereof, particularly fragments that encode a biologically active gene product and/or are useful in the methods disclosed herein. The term “cDNA” as used herein is intended to include all nucleic acids that share the arrangement of sequence elements found in native mature mRNA species, where sequence elements are exons and 3′ and 5′ non-coding regions. Normally mRNA species have contiguous exons, with the introns, when present, being removed by nuclear RNA splicing, to create a continuous open reading frame encoding a polypeptide of the invention.

[0031] A genomic sequence of interest comprises the nucleic acid present between the initiation codon and the stop codon, as defined in the listed sequences, including all of the introns that are normally present in a native chromosome. It can further include the 3′ and 5′ untranslated regions found in the mature mRNA. It can further include specific transcriptional and translational regulatory sequences, such as promoters, enhancers, etc., including about 1 kb, but possibly more, of flanking genomic DNA at either the 5′ and 3′ end of the transcribed region. The genomic DNA can be isolated as a fragment of 100 kb or smaller; and substantially free of flanking chromosomal sequence. The genomic DNA flanking the coding region, either 3′ and 5′, or internal regulatory sequences as sometimes found in introns, contains sequences required for expression.

[0032] The nucleic acid compositions of the subject invention can encode all or a part of the subject expressed polypeptides. Double or single stranded fragments can be obtained from the DNA sequence by chemically synthesizing oligonucleotides in accordance with conventional methods, by restriction enzyme digestion, by PCR amplification, etc. Isolated nucleic acids and nucleic acid fragments of the invention comprise at least about 15 up to about 100 contiguous nucleotides, or up to the complete sequence provided in SEQ ID NOS:1-999. For the most part, fragments will be of at least 15 nt, usually at least 18 nt or 25 nt, and up to at least about 50 contiguous nt in length or more.

[0033] Probes specific to the nucleic acids of the invention can be generated using the nucleic acid sequences disclosed in SEQ ID NOS:1-999 and the fragments as described above. The probes can be synthesized chemically or can be generated from longer nucleic acids using restriction enzymes. The probes can be labeled, for example, with a radioactive, biotinylated, or fluorescent tag. Preferably, probes are designed based upon an identifying sequence of a nucleic acid of one of SEQ ID NOS:1-999. More preferably, probes are designed based on a contiguous sequence of one of the subject nucleic acids that remain unmasked following application of a masking program for masking low complexity (e.g., XBLAST) to the sequence., i.e. one would select an unmasked region, as indicated by the nucleic acids outside the poly-n stretches of the masked sequence produced by the masking program.

[0034] The nucleic acids of the subject invention are isolated and obtained in substantial purity, generally as other than an intact chromosome. Usually, the nucleic acids, either as DNA or RNA, will be obtained substantially free of other naturally-occurring nucleic acid sequences, generally being at least about 50%, usually at least about 90% pure and are typically “recombinant”, e.g., flanked by one or more nucleotides with which it is not normally associated on a naturally occurring chromosome.

[0035] The nucleic acids of the invention can be provided as a linear molecule or within a circular molecule. They can be provided within autonomously replicating molecules (vectors) or within molecules without replication sequences. They can be regulated by their own or by other regulatory sequences, as is known in the art. The nucleic acids of the invention can be introduced into suitable host cells using a variety of techniques which are available in the art, such as transferrin polycation-mediated DNA transfer, transfection with naked or encapsulated nucleic acids, liposome-mediated DNA transfer, intracellular transportation of DNA-coated latex beads, protoplast fusion, viral infection, electroporation, gene gun, calcium phosphate-mediated transfection, and the like.

[0036] The subject nucleic acid compositions can be used to, for example, produce polypeptides, as probes for the detection of mRNA of the invention in biological samples, e.g. extracts of cells, to generate additional copies of the nucleic acids, to generate ribozymes or antisense oligonucleotides, and as single stranded DNA probes or as triple-strand forming oligonucleotides. The probes described herein can be used to, for example, determine the presence or absence of the nucleic acid sequences as shown in SEQ ID NOS:1-999 or variants thereof in a sample. These and other uses are described in more detail below.

### USE OF NUCLEIC ACIDS AS CODING SEQUENCES

[0037] Naturally occurring Arabidopsis polypeptides or fragments thereof are encoded by the provided nucleic acids. Methods are known in the art to determine whether the complete native protein is encoded by a candidate nucleic acid sequence. Where the provided sequence encodes a fragment of a polypeptide, methods known in the art may be used to determine the remaining sequence. These approaches may utilize a bioinformatics approach, a cloning approach, extension of mRNA species, etc.

[0038] Substantial genomic sequence is available for Arabidopsis, and may be exploited for determining the complete coding sequence corresponding to the provided sequences. The region of the chromosome to which a given sequence is located may be determined by hybridization or by database searching. The genomic sequence is then searched upstream and downstream for the presence of intron/exon boundaries, and for motifs characteristic of transcriptional start and stop sequences, for example by using Genscan (Burge and Karlin (1997) J. Mol. Biol. 268:78-94); or GRAIL (Uberbacher and Mural (1991) P.N.A.S. 88:11261-1265).

[0039] Alternatively, nucleic acid having a sequence of one of SEQ ID NOS:1-999, or an identifying fragment thereof, is used as a hybridization probe to complementary molecules in a cDNA library using probe design methods, cloning methods, and clone selection techniques as known in the art. Libraries of cDNA are made from selected cells. The cells may be those of A. thaliana, or of related species. In some cases it will be desirable to select cells from a particular stage, e.g. seeds, leaves, infected cells, etc.

[0040] Techniques for producing and probing nucleic acid sequence libraries are described, for example, in Sambrook et al., Molecular Cloning: A Laboratory Manual, 2^{nd} Ed., (1989) Cold Spring Harbor Press, Cold Spring Harbor, N.Y.; and Current Protocols in Molecular Biology, (1987 and updates) Ausubel et al., eds. The cDNA can be prepared by using primers based on sequence from SEQ ID NOS:1-999. In one embodiment, the cDNA library can be made from only poly-adenylated mRNA. Thus, poly-T primers can be used to prepare cDNA from the mRNA.

[0041] Members of the library that are larger than the provided nucleic acids, and preferably that encompass the complete coding sequence of the native message, are obtained. In order to confirm that the entire cDNA has been obtained, RNA protection experiments are performed as follows. Hybridization of a full-length cDNA to an mRNA will protect the RNA from RNase degradation. If the cDNA is not full length, then the portions of the mRNA that are not hybridized will be subject to RNase degradation. This is assayed, as is known in the art, by changes in electrophoretic mobility on polyacrylamide gels, or by detection of released monoribonucleotides. Sambrook et al., Molecular Cloning: A Laboratory Manual, 2^{nd} Ed., (1989) Cold Spring Harbor Press, Cold Spring Harbor, N.Y. In order to obtain additional sequences 5′ to the end of a partial cDNA, 5′ RACE (PCR Protocols: A Guide to Methods and Applications, (1990) Academic Press, Inc.) may be performed.

[0042] Genomic DNA is isolated using the provided nucleic acids in a manner similar to the isolation of full-length cDNAs. Briefly, the provided nucleic acids, or portions thereof, are used as probes to libraries of genomic DNA. Preferably, the library is obtained from the cell type that was used to generate the nucleic acids of the invention, but this is not essential. Such libraries can be in vectors suitable for carrying large segments of a genome, such as P1 or YAC, as described in detail in Sambrook et al., 9.4-9.30. In order to obtain additional 5′ or 3′ sequences, chromosome walking is performed, as described in Sambrook et al., such that adjacent and overlapping fragments of genomic DNA are isolated. These are mapped and pieced together, as is known in the art, using restriction digestion enzymes and DNA ligase.

[0043] PCR methods may be used to amplify the members of a cDNA library that comprise the desired insert. In this case, the desired insert will contain sequence from the full length cDNA that corresponds to the instant nucleic acids. Such PCR methods include gene trapping and RACE methods. Gene trapping entails inserting a member of a cDNA library into a vector. The vector then is denatured to produce single stranded molecules. Next, a substrate-bound probe, such a biotinylated oligo, is used to trap cDNA inserts of interest. Biotinylated probes can be linked to an avidin-bound solid substrate. PCR methods can be used to amplify the trapped cDNA. To trap sequences corresponding to the full length genes, the labeled probe sequence is based on the nucleic acid sequences of the invention. Random primers or primers specific to the library vector can be used to amplify the trapped cDNA. Such gene trapping techniques are described in Gruber et al., WO 95/04745 and Gruber et al., U.S. Pat. No. 5,500,356. Kits are commercially available to perform gene trapping experiments from, for example, Life Technologies, Gaithersburg, Md., USA.

[0044] “Rapid amplification of cDNA ends”, or RACE, is a PCR method of amplifying cDNAs from a number of different RNAs. The cDNAs are ligated to an oligonucleotide linker, and amplified by PCR using two primers. One primer is based on sequence from the instant nucleic acids, for which full length sequence is desired, and a second primer comprises sequence that hybridizes to the oligonucleotide linker to amplify the cDNA. A description of this methods is reported in WO 97/19110. A common primer may be designed to anneal to an arbitrary adaptor sequence ligated to cDNA ends. When a single gene-specific RACE primer is paired with the common primer, preferential amplification of sequences between the single gene specific primer and the common primer occurs. Commercial cDNA pools modified for use in RACE are available.

[0045] Once the full-length cDNA or gene is obtained, DNA encoding variants can be prepared by site-directed mutagenesis, described in detail in Sambrook et al., 15.3-15.63. The choice of codon or nucleotide to be replaced can be based on disclosure herein on optional changes in amino acids to achieve altered protein structure and/or function. As an alternative method to obtaining DNA or RNA from a biological material, nucleic acid comprising nucleotides having the sequence of one or more nucleic acids of the invention can be synthesized.

### EXPRESSION OF POLYPEPTIDES

[0046] The provided nucleic acid, e.g. a nucleic acid having a sequence of one of SEQ ID NOS:1-999), the corresponding cDNA, the polypeptide coding sequence as described above, or the full-length gene is used to express a partial or complete gene product. Constructs of nucleic acids having sequences of SEQ ID NOS:1-999 can be generated by recombinant methods, synthetically, or in a single-step assembly of a gene and entire plasmid from large numbers of oligodeoxyribonucleotides is described by, e.g. Stemmer et al., Gene (Amsterdam) (1995) 164(1):49-53.

[0047] Appropriate nucleic acid constructs are purified using standard recombinant DNA techniques as described in, for example, Sambrook et al., Molecular Cloning: A Laboratory Manual, 2^{nd} Ed., (1989) Cold Spring Harbor Press, Cold Spring Harbor, N.Y. The gene product encoded by a nucleic acid of the invention is expressed in any expression system, including, for example, bacterial, yeast, insect, amphibian and mammalian systems.

[0048] The subject nucleic acid molecules are generally propagated by placing the molecule in a vector. Viral and non-viral vectors are used, including plasmids. The choice of plasmid will depend on the type of cell in which propagation is desired and the purpose of propagation. Certain vectors are useful for amplifying and making large amounts of the desired DNA sequence. Other vectors are suitable for expression in cells in culture. Still other vectors are suitable for transfer and expression in cells in a whole organism or person. The choice of appropriate vector is well within the skill of the art. Many such vectors are available commercially.

[0049] The nucleic acids set forth in SEQ ID NOS:1-999 or their corresponding full-length nucleic acids are linked to regulatory sequences as appropriate to obtain the desired expression properties. These can include promoters attached either at the 5′ end of the sense strand or at the 3′ end of the antisense strand, enhancers, terminators, operators, repressors, and inducers. The promoters can be regulated or constitutive. In some situations it may be desirable to use conditionally active promoters, such as tissue-specific or developmental stage-specific promoters. These are linked to the desired nucleotide sequence using the techniques described above for linkage to vectors. Any techniques known in the art can be used.

[0050] When any of the above host cells, or other appropriate host cells or organisms, are used to replicate and/or express the nucleic acids or nucleic acids of the invention, the resulting replicated nucleic acid, RNA, expressed protein or polypeptide, is within the scope of the invention as a product of the host cell or organism. The product is recovered by any appropriate means known in the art.

### IDENTIFICATION OF FUNCTIONAL AND STRUCTURAL MOTIFS

[0051] Translations of the nucleotide sequence of the provided nucleic acids, cDNAs or full genes can be aligned with individual known sequences. Similarity with individual sequences can be used to determine the activity of the polypeptides encoded by the nucleic acids of the invention. Also, sequences exhibiting similarity with more than one individual sequence can exhibit activities that are characteristic of either or both individual sequences.

[0052] The six possible reading frames may be translated using programs such as GCG pepdata, or GCG Frames (Wisconsin Package Version 10.0, Genetics Computer Group (GCG) , Madison, Wis., USA.). Programs such as ORFFinder (National Center for Biotechnology Information (NCBI) a division of the National Library of Medicine (NLM) at the National Institutes of Health (NIH) http://www.ncbi.nlm.nih.gov/) may be used to identify open reading frames (ORFs) in sequences. ORF finder identifies all possible ORFs in a DNA sequence by locating the standard and alternative stop and start codons. Other ORF identification programs include Genie (Kulp et al. (1996).

[0053] A generalized Hidden Markov Model may be used for the recognition of genes in DNA. (ISMB-96, St. Louis, Mo., AAAI/MIT Press; Reese et al. (1997), “Improved splice site detection in Genie”. Proceedings of the First Annual International Conference on Computational Molecular Biology RECOMB 1997, Santa Fe, N.Mex., ACM Press, New York., P. 34.); BESTORF—Prediction of potential coding fragment in human or plant EST/mRNA sequence data using Markov Chain Models; and FGENEP—Multiple genes structure prediction in plant genomic DNA (Solovyev et al. (1995) Identification of human gene structure using linear discriminant functions and dynamic programming. In Proceedings of the Third International Conference on Intelligent Systems for Molecular Biology eds. Rawling et al. Cambridge, England, AAAI Press,367-375.; Solovyev et al. (1994) Nucl. Acids Res. 22(24):5156-5163; Solovyev et al,. The prediction of human exons by oligonucleotide composition and discriminant analysis of spliceable open reading frames, in: The Second International conference on Intelligent systems for Molecular Biology (eds. Altman et al.), AAAI Press, Menlo Park, Calif. (1994, 354-362) Solovyev and Lawrence, Prediction of human gene structure using dynamic programming and oligonucleotide composition, In: Abstracts of the 4th annual Keck symposium. Pittsburgh, 47,1993; Burge and Karlin (1997) J. Mol. Biol. 268:78-94; Kulp et al. (1996) Proc. Conf. on Intelligent Systems in Molecular Biology 96, 134-142).

[0054] The full length sequences and fragments of the nucleic acid sequences of the nearest neighbors can be used as probes and primers to identify and isolate the full length sequence corresponding to provided nucleic acids. Typically, a selected nucleic acid is translated in all six frames to determine the best alignment with the individual sequences. These amino acid sequences are referred to, generally, as query sequences, which are aligned with the individual sequences. Suitable databases include Genbank, EMBL, and DNA Database of Japan (DDBJ).

[0055] Query and individual sequences can be aligned using the methods and computer programs described above, and include BLAST, available by ftp at ftp://ncbi.nlm.nih.gov/.

[0056] Gapped BLAST and PSI-BLAST are useful search tools provided by NCBI. (version 2.0) (Altschul et al., 1997). Position-Specific Iterated BLAST (PSI-BLAST) provides an automated, easy-to-use version of a profile search, which is a sensitive way to look for sequence homologues. The program first performs a gapped BLAST database search. The PSI-BLAST program uses the information from any significant alignments returned to construct a position-specific score matrix, which replaces the query sequence for the next round of database searching. PSI-BLAST may be iterated until no new significant alignments are found. The Gapped BLAST algorithm allows gaps (deletions and insertions) to be introduced into the alignments that are returned. Allowing gaps means that similar regions are not broken into several segments. The scoring of these gapped alignments tends to reflect biological relationships more closely. The Smith-Waterman is another algorithm that produces local or global gapped sequence alignments, see Meth. Mol. Biol. (1997) 70: 173-187. Also, the GAP program using the Needleman and Wunsch global alignment method can be utilized for sequence alignments.

[0057] Results of individual and query sequence alignments can be divided into three categories, high similarity, weak similarity, and no similarity. Individual alignment results ranging from high similarity to weak similarity provide a basis for determining polypeptide activity and/or structure. Parameters for categorizing individual results include: percentage of the alignment region length where the strongest alignment is found, percent sequence identity, and e value.

[0058] The percentage of the alignment region length is calculated by counting the number of residues of the individual sequence found in the region of strongest alignment, e.g. contiguous region of the individual sequence that contains the greatest number of residues that are identical to the residues of the corresponding region of the aligned query sequence. This number is divided by the total residue length of the query sequence to calculate a percentage. For example, a query sequence of 20 amino acid residues might be aligned with a 20 amino acid region of an individual sequence. The individual sequence might be identical to amino acid residues 5, 9-15, and 17-19 of the query sequence. The region of strongest alignment is thus the region stretching from residue 9-19, an 11 amino acid stretch. The percentage of the alignment region length is: 11 (length of the region of strongest alignment) divided by (query sequence length) 20 or 55%.

[0059] Percent sequence identity is calculated by counting the number of amino acid matches between the query and individual sequence and dividing total number of matches by the number of residues of the individual sequences found in the region of strongest alignment. Thus, the percent identity in the example above would be 10 matches divided by 11 amino acids, or approximately, 90.9%

[0060] E value is the probability that the alignment was produced by chance. For a single alignment, the e value can be calculated according to Karlin et al., Proc. Natl. Acad. Sci. (1990) 87:2264 and Karlin et al., Proc. Natl. Acad. Sci. (1993) 90. The e value of multiple alignments using the same query sequence can be calculated using an heuristic approach described in Altschul et al., Nat. Genet. (1994) 6:119. Alignment programs such as BLAST program can calculate the e value.

[0061] Another factor to consider for determining identity or similarity is the location of the similarity or identity. Strong local alignment can indicate similarity even if the length of alignment is short. Sequence identity scattered throughout the length of the query sequence also can indicate a similarity between the query and profile sequences. The boundaries of the region where the sequences align can be determined according to Doolittle, supra; BLAST or FASTA programs; or by determining the area where sequence identity is highest.

[0062] In general, in alignment results considered to be of high similarity, the percent of the alignment region length is typically at least about 55% of total length query sequence; more typically, at least about 58%; even more typically; at least about 60% of the total residue length of the query sequence. Usually, percent length of the alignment region can be as much as about 62%; more usually, as much as about 64%; even more usually, as much as about 66%. Further, for high similarity, the region of alignment, typically, exhibits at least about 75% of sequence identity; more typically, at least about 78%; even more typically; at least about 80% sequence identity. Usually, percent sequence identity can be as much as about 82%; more usually, as much as about 84%; even more usually, as much as about 86%.

[0063] The p value is used in conjunction with these methods. The query sequence is considered to have a high similarity with a profile sequence when the p value is less than or equal to 10⁻². Confidence in the degree of similarity between the query sequence and the profile sequence increases as the p value become smaller.

[0064] In general, where alignment results considered to be of weak similarity, there is no minimum percent length of the alignment region nor minimum length of alignment. A better showing of weak similarity is considered when the region of alignment is, typically, at least about 15 amino acid residues in length; more typically, at least about 20; even more typically; at least about 25 amino acid residues in length. Usually, length of the alignment region can be as much as about 30 amino acid residues; more usually, as much as about 40; even more usually, as much as about 60 amino acid residues. Further, for weak similarity, the region of alignment, typically, exhibits at least about 35% of sequence identity; more typically, at least about 40%; even more typically; at least about 45% sequence identity. Usually, percent sequence identity can be as much as about 50%; more usually, as much as about 55%; even more usually, as much as about 60%.

[0065] The query sequence is considered to have a low similarity with a profile sequence when the p value is greater than 10⁻². Confidence in the degree of similarity between the query sequence and the profile sequence decreases as the p values become larger.

[0066] Sequence identity alone can be used to determine similarity of a query sequence to an individual sequence and can indicate the activity of the sequence. Such an alignment, preferably, permits gaps to align sequences. Typically, the query sequence is related to the profile sequence if the sequence identity over the entire query sequence is at least about 15%; more typically, at least about 20%; even more typically, at least about 25%; even more typically, at least about 50%. Sequence identity alone as a measure of similarity is most useful when the query sequence is usually, at least 80 residues in length; more usually, 90 residues; even more usually, at least 95 amino acid residues in length. More typically, similarity can be concluded based on sequence identity alone when the query sequence is preferably 100 residues in length; more preferably, 120 residues in length; even more preferably, 150 amino acid residues in length.

[0067] It is apparent, when studying protein sequence families, that some regions have been better conserved than others during evolution. These regions are generally important for the function of a protein and/or for the maintenance of its three-dimensional structure. By analyzing the constant and variable properties of such groups of similar sequences, it is possible to derive a signature for a protein family or domain, which distinguishes its members from all other unrelated proteins. A pertinent analogy is the use of fingerprints by the police for identification purposes. A fingerprint is generally sufficient to identify a given individual. Similarly, a protein signature can be used to assign a new sequence to a specific family of proteins and thus to formulate hypotheses about its function. The PROSITE database is a compendium of such fingerprints (motifs) and may be used with search software such as Wisconsin GCG Motifs to find motifs or fingerprints in query sequences. PROSITE currently contains signatures specific for about a thousand protein families or domains. Each of these signatures comes with documentation providing background information on the structure and function of these proteins (Hofmann et al. (1999) Nucleic Acids Res. 27:215-219; Bucher and Bairoch., A generalized profile syntax for biomolecular sequences motifs and its function in automatic sequence interpretation (In) ISMB-94; Proceedings 2nd International Conference on Intelligent Systems for Molecular Biology; Altman et al. Eds. (1994), pp 53-61, AAAI Press, Menlo Park).

[0068] Translations of the provided nucleic acids can be aligned with amino acid profiles that define either protein families or common motifs. Also, translations of the provided nucleic acids can be aligned to multiple sequence alignments (MSA) comprising the polypeptide sequences of members of protein families or motifs. Similarity or identity with profile sequences or MSAs can be used to determine the activity of the gene products (e.g., polypeptides) encoded by the provided nucleic acids or corresponding cDNA or genes.

[0069] Profiles can designed manually by (1) creating an MSA, which is an alignment of the amino acid sequence of members that belong to the family and (2) constructing a statistical representation of the alignment. Such methods are described, for example, in Birney et al., Nucl. Acid Res. (1996) 24(14): 2730-2739. MSAs of some protein families and motifs are available for downloading to a local server. For example, the PFAM database with MSAs of 547 different families and motifs, and the software (HMMER) to search the PFAM database may be downloaded from ftp://ftp.genetics.wustl.edu/pub/eddy/pfam-4.4/ to allow secure searches on a local server. Pfam is a database of multiple alignments of protein domains or conserved protein regions., which represent evolutionary conserved structure that has implications for the protein's function (Sonnhammer et al. (1998) Nucl. Acid Res. 26:320-322; Bateman et al. (1999) Nucleic Acids Res. 27:260-262).

[0070] The 3D_ali databank (Pasarella, S. and Argos, P. (1992) Prot. Engineering 5:121-137) was constructed to incorporate new protein structural and sequence data. The databank has proved useful in many research fields such as protein sequence and structure analysis and comparison, protein folding, engineering and design and evolution. The collection enhances present protein structural knowledge by merging information from proteins of similar main-chain fold with homologous primary structures taken from large databases of all known sequences. 3D_ali databank files may be downloaded to a secure local server from http://www.embl-heidelberg.de/argos/ali/ali_form.html.

[0071] The identify and function of the gene that correlates to a nucleic acid described herein can be determined by screening the nucleic acids or their corresponding amino acid sequences against profiles of protein families. Such profiles focus on common structural motifs among proteins of each family. Publicly available profiles are known in the art.

[0072] In comparing a novel nucleic acid with known sequences, several alignment tools are available. Examples include PileUp, which creates a multiple sequence alignment, and is described in Feng et al., J. Mol. Evol. (1987) 25:351. Another method, GAP, uses the alignment method of Needleman et al., J. Mol. Biol. (1970) 48:443. GAP is best suited for global alignment of sequences. A third method, BestFit, functions by inserting gaps to maximize the number of matches using the local homology algorithm of Smith et al. (1981) Adv. Appl. Math. 2:482.

### IDENTIFICATION OF SECRETED & MEMBRANE-BOUND POLYPEPTIDES

[0073] Secreted and membrane-bound polypeptides of the present invention are of interest. Because both secreted and membrane-bound polypeptides comprise a fragment of contiguous hydrophobic amino acids, hydrophobicity predicting algorithms can be used to identify such polypeptides. A signal sequence is usually encoded by both secreted and membrane-bound polypeptide genes to direct a polypeptide to the surface of the cell. The signal sequence usually comprises a stretch of hydrophobic residues. Such signal sequences can fold into helical structures. Membrane-bound polypeptides typically comprise at least one transmembrane region that possesses a stretch of hydrophobic amino acids that can transverse the membrane. Some transmembrane regions also exhibit a helical structure. Hydrophobic fragments within a polypeptide can be identified by using computer algorithms. Such algorithms include Hopp & Woods, Proc. Natl. Acad. Sci. USA (1981) 78:3824-3828; Kyte & Doolittle, J. Mol. Biol. (1982) 157: 105-132; and RAOAR algorithm, Degli Esposti et al., Eur. J. Biochem. (1990) 190: 207-219.

[0074] Another method of identifying secreted and membrane-bound polypeptides is to translate the nucleic acids of the invention in all six frames and determine if at least 8 contiguous hydrophobic amino acids are present. Those translated polypeptides with at least 8; more typically, 10; even more typically, 12 contiguous hydrophobic amino acids are considered to be either a putative secreted or membrane bound polypeptide. Hydrophobic amino acids include alanine, glycine, histidine, isoleucine, leucine, lysine, methionine, phenylalanine, proline, threonine, tryptophan, tyrosine, and valine.

### IDENTIFICATION OF THE FUNCTION OF AN EXPRESSION PRODUCT

[0075] The biological function of the encoded gene product of the invention may be determined by empirical or deductive methods. One promising avenue, termed phylogenomics, exploits the use of evolutionary information to facilitate assignment of gene function. The approach is based on the idea that functional predictions can be greatly improved by focusing on how genes became similar in sequence during evolution instead of focusing on the sequence similarity itself. One of the major efficiencies that has emerged from plant genome research to date is that a large percentage of higher plant genes can be assigned some degree of function by comparing them with the sequences of genes of known function.

[0076] Alternatively, “reverse genetics” is used to identify gene function. Large collections of insertion mutants are available for Arabidopsis, maize, petunia, and snapdragon. These collections can be screened for an insertional inactivation of any gene by using the polymerase chain reaction (PCR) primed with oligonucleotides based on the sequences of the target gene and the insertional mutagen. The presence of an insertion in the target gene is indicated by the presence of a PCR product. By multiplexing DNA samples, hundreds of thousands of lines can be screened and the corresponding mutant plants can be identified with relatively small effort. Analysis of the phenotype and other properties of the corresponding mutant will provide an insight into the function of the gene.

[0077] In one method of the invention, the gene function in a transgenic Arabidopsis plant is assessed with anti-sense constructs. A high degree of gene duplication is apparent in Arabidopsis, and many of the gene duplications in Arabidopsis are very tightly linked. Large numbers of transgenic Arabidopsis plants can be generated by infecting flowers with Agrobacterium tumefaciens containing an insertional mutagen, a method of gene silencing based on producing double-stranded RNA from bidirectional transcription of genes in transgenic plants can be broadly useful for high-throughput gene inactivation (Clough and Bent (1999) Plant J. 17; Waterhouse et al. (1998) Proc. Natl. Acad. Sci. U.S.A. 95:13959). This method may use promoters that are expressed in only a few cell types or at a particular developmental stage or in response to an external stimulus. This could significantly obviate problems associated with the lethality of some mutations.

[0078] Virus-induced gene silencing may also find use for suppressing gene function. This method exploits the fact that some or all plants have a surveillance system that can specifically recognize viral nucleic acids and mount a sequence-specific suppression of viral RNA accumulation. By inoculating plants with a recombinant virus containing part of a plant gene, it is possible to rapidly silence the endogenous plant gene.

[0079] Antisense nucleic acids are designed to specifically bind to RNA, resulting in the formation of RNA-DNA or RNA-RNA hybrids, with an arrest of DNA replication, reverse transcription or messenger RNA translation. Antisense nucleic acids based on a selected nucleic acid sequence can interfere with expression of the corresponding gene. Antisense nucleic acids are typically generated within the cell by expression from antisense constructs that contain the antisense strand as the transcribed strand. Antisense nucleic acids based on the disclosed nucleic acids will bind and/or interfere with the translation of mRNA comprising a sequence complementary to the antisense nucleic acid. The expression products of control cells and cells treated with the antisense construct are compared to detect the protein product of the gene corresponding to the nucleic acid upon which the antisense construct is based. The protein is isolated and identified using routine biochemical methods.

[0080] As an alternative method for identifying function of the gene corresponding to a nucleic acid disclosed herein, dominant negative mutations are readily generated for corresponding proteins that are active as homomultimers. A mutant polypeptide will interact with wild-type polypeptides (made from the other allele) and form a non-functional multimer. Thus, a mutation is in a substrate-binding domain, a catalytic domain, or a cellular localization domain. Preferably, the mutant polypeptide will be overproduced. Point mutations are made that have such an effect. In addition, fusion of different polypeptides of various lengths to the terminus of a protein can yield dominant negative mutants. General strategies are available for making dominant negative mutants (see for example, Herskowitz (1987) Nature 329:219). Such techniques can be used to create loss of function mutations, which are useful for determining protein function.

[0081] Another approach for discovering the function of genes utilizes gene chips and microarrays. DNA sequences representing all the genes in an organism can be placed on miniature solid supports and used as hybridization substrates to quantitate the expression of all the genes represented in a complex mRNA sample. This information is used to provide extensive databases of quantitative information about the degree to which each gene responds to pathogens, pests, drought, cold, salt, photoperiod, and other environmental variation. Similarly, one obtains extensive information about which genes respond to changes in developmental processes such as germination and flowering. One can therefore determine which genes respond to the phytohormones, growth regulators, safeners, herbicides, and related agrichemicals. These databases of gene expression information provide insights into the “pathways” of genes that control complex responses. The accumulation of DNA microarray or gene chip data from many different experiments creates a powerful opportunity to assign functional information to genes of otherwise unknown function. The conceptual basis of the approach is that genes that contribute to the same biological process will exhibit similar patterns of expression. Thus, by clustering genes based on the similarity of their relative levels of expression in response to diverse stimuli or developmental or environmental conditions, it is possible to assign functions to many genes based on the known function of other genes in the cluster.

### CONSTRUCTION OF POLYPEPTIDES OF THE INVENTION AND VARIANTS THEREOF

[0082] The polypeptides of the invention include those encoded by the disclosed nucleic acids. These polypeptides can also be encoded by nucleic acids that, by virtue of the degeneracy of the genetic code, are not identical in sequence to the disclosed nucleic acids. Thus, the invention includes within its scope a polypeptide encoded by a nucleic acid having the sequence of any one of SEQ ID NOS: 1-999 or a variant thereof.

[0083] In general, the term “polypeptide” as used herein refers to both the full length polypeptide encoded by the recited nucleic acid, the polypeptide encoded by the gene represented by the recited nucleic acid, as well as portions or fragments thereof. “Polypeptides” also includes variants of the naturally occurring proteins, where such variants are homologous or substantially similar to the naturally occurring protein, and can be of an origin of the same or different species as the naturally occurring protein. In general, variant polypeptides have a sequence that has at least about 80%, usually at least about 90%, and more usually at least about 98% sequence identity with a differentially expressed polypeptide of the invention, as measured by BLAST using the parameters described above. The variant polypeptides can be naturally or non-naturally glycosylated, i.e., the polypeptide has a glycosylation pattern that differs from the glycosylation pattern found in the corresponding naturally occurring protein.

[0084] In general, the polypeptides of the subject invention are provided in a non-naturally occurring environment, e.g. are separated from their naturally occurring environment. In certain embodiments, the subject protein is present in a composition that is enriched for the protein as compared to a control. As such, purified polypeptide is provided, where by purified is meant that the protein is present in a composition that is substantially free of non-differentially expressed polypeptides, where by substantially free is meant that less than 90%, usually less than 60% and more usually less than 50% of the composition is made up of non-differentially expressed polypeptides.

[0085] Also within the scope of the invention are variants; variants of polypeptides include mutants, fragments, and fusions. Mutants can include amino acid substitutions, additions or deletions. The amino acid substitutions can be conservative amino acid substitutions or substitutions to eliminate non-essential amino acids, such as to alter a glycosylation site, a phosphorylation site or an acetylation site, or to minimize misfolding by substitution or deletion of one or more cysteine residues that are not necessary for function. Conservative amino acid substitutions are those that preserve the general charge, hydrophobicity/hydrophilicity, and/or steric bulk of the amino acid substituted.

[0086] Variants also include fragments of the polypeptides disclosed herein, particularly biologically active fragments and/or fragments corresponding to functional domains. Fragments of interest will typically be at least about 10 amino acids (aa) to at least about 15 aa in length, usually at least about 50 aa in length, and can be as long as 300 aa in length or longer, but will usually not exceed about 1000 aa in length, where the fragment will have a stretch of amino acids that is identical to a polypeptide encoded by a nucleic acid having a sequence of any SEQ ID NOS:1-999, or a homolog thereof.

[0087] The protein variants described herein are encoded by nucleic acids that are within the scope of the invention. The genetic code can be used to select the appropriate codons to construct the corresponding variants.

### LIBRARIES AND ARRAYS

[0088] In general, a library of biopolymers is a collection of sequence information, which information is provided in either biochemical form (e.g., as a collection of nucleic acid or polypeptide molecules), or in electronic form (e.g., as a collection of genetic sequences stored in a computer-readable form, as in a computer system and/or as part of a computer program). The term biopolymer, as used herein, is intended to refer to polypeptides, nucleic acids, and derivatives thereof, which molecules are characterized by the possession of genetic sequences either corresponding to, or encoded by, the sequences set forth in the provided sequence list (seqlist). The sequence information can be used in a variety of ways, e.g., as a resource for gene discovery, as a representation of sequences expressed in a selected cell type, e.g. cell type markers, etc.

[0089] The nucleic acid libraries of the subject invention include sequence information of a plurality of nucleic acid sequences, where at least one of the nucleic acids has a sequence of any of SEQ ID NOS:1-999. By plurality is meant one or more, usually at least 2 and can include up to all of SEQ ID NOS:1-999. The length and number of nucleic acids in the library will vary with the nature of the library, e.g., if the library is an oligonucleotide array, a cDNA array, a computer database of the sequence information, etc.

[0090] Where the library is an electronic library, the nucleic acid sequence information can be present in a variety of media. “Media” refers to a manufacture, other than an isolated nucleic acid molecule, that contains the sequence information of the present invention. Such a manufacture provides the sequences or a subset thereof in a form that can be examined by means not directly applicable to the sequence as it exists in a nucleic acid. For example, the nucleotide sequence of the present invention, e.g. the nucleic acid sequences of any of the nucleic acids of SEQ ID NOS:1-999, can be recorded on computer readable media, e.g. any medium that can be read and accessed directly by a computer. Such media include, but are not limited to: magnetic storage media, such as a floppy disc, a hard disc storage medium, and a magnetic tape; optical storage media such as CD-ROM; electrical storage media such as RAM and ROM; and hybrids of these categories such as magnetic/optical storage media. One of skill in the art can readily appreciate how any of the presently known computer readable mediums can be used to create a manufacture comprising a recording of the present sequence information. “Recorded” refers to a process for storing information on computer readable medium, using any such methods as known in the art. Any convenient data storage structure can be chosen, based on the means used to access the stored information. A variety of data processor programs and formats can be used for storage, e.g. word processing text file, database format, etc. In addition to the sequence information, electronic versions of the libraries of the invention can be provided in conjunction or connection with other computer-readable information and/or other types of computer-readable files (e.g., searchable files, executable files, etc, including, but not limited to, for example, search program software, etc.)

[0091] By providing the nucleotide sequence in computer readable form, the information can be accessed for a variety of purposes. Computer software to access sequence information is publicly available. For example, the BLAST (Altschul et al., supra.) and BLAZE (Brutlag et al. Comp. Chem. (1993) 17:203) search algorithms on a Sybase system can be used identify open reading frames (ORFs) within the genome that contain homology to ORFs from other organisms.

[0092] As used herein, “a computer-based system” refers to the hardware means, software means, and data storage means used to analyze the nucleotide sequence information of the present invention. The minimum hardware of the computer-based systems of the present invention comprises a central processing unit (CPU), input means, output means, and data storage means. A skilled artisan can readily appreciate that any one of the currently available computer-based system are suitable for use in the present invention. The data storage means can comprise any manufacture comprising a recording of the present sequence information as described above, or a memory access means that can access such a manufacture.

[0093] “Search means” refers to one or more programs implemented on the computer-based system, to compare a target sequence or target structural motif with the stored sequence information. Search means are used to identify fragments or regions of the genome that match a particular target sequence or target motif. A variety of known algorithms are publicly known and commercially available, e.g. MacPattern (EMBL), BLASTN, BLASTX (NCBI) and tBLASTX. “A target sequence” can be any DNA or amino acid sequence of six or more nucleotides or two or more amino acids, preferably from about 10 to 100 amino acids or from about 30 to 300 nucleotide residues.

[0094] A “target structural motif,” or “target motif,” refers to any rationally selected sequence or combination of sequences in which the sequence(s) are chosen based on a three-dimensional configuration that is formed upon the folding of the target motif, or on consensus sequences of regulatory or active sites. There are a variety of target motifs known in the art. Protein target motifs include, but arc not limited to, enzyme active sites and signal sequences. Nucleic acid target motifs include, but are not limited to, hairpin structures, promoter sequences and other expression elements such as binding sites for transcription factors.

[0095] A variety of structural formats for the input and output means can be used to input and output the information in the computer-based systems of the present invention. One format for an output means ranks fragments of the genome possessing varying degrees of homology to a target sequence or target motif. Such presentation provides a skilled artisan with a ranking of sequences and identifies the degree of sequence similarity contained in the identified fragment.

[0096] A variety of comparing means can be used to compare a target sequence or target motif with the data storage means to identify sequence fragments of the genome. A skilled artisan can readily recognize that any one of the publicly available homology search programs can be used as the search means for the computer based systems of the present invention.

[0097] As discussed above, the “library” of the invention also encompasses biochemical libraries of the nucleic acids of SEQ ID NOS:1-999, e.g., collections of nucleic acids representing the provided nucleic acids. The biochemical libraries can take a variety of forms, e.g. a solution of cDNAs, a pattern of probe nucleic acids stably bound to a surface of a solid support (microarray) and the like. By array is meant an article of manufacture that has a solid support or substrate with one or more nucleic acid targets on one of its surfaces, where the number of distinct nucleic may be in the hundreds, thousand, or tens of thousands. Each nucleic acid will comprise at 18 nt and often at least 25 nt, and often at least 100 to 1000 nucleotides, and may represent up to a complete coding sequence or cDNA. A variety of different array formats have been developed and are known to those of skill in the art. The arrays of the subject invention find use in a variety of applications, including gene expression analysis, drug screening, mutation analysis and the like, as disclosed in the above-listed exemplary patent documents.

[0098] In addition to the above nucleic acid libraries, analogous libraries of polypeptides are also provided, where the where the polypeptides of the library will represent at least a portion of the polypeptides encoded by SEQ ID NOS:1-999.

### GENETICALLY ALTERED CELLS AND TRANSGENICS

[0099] The subject nucleic acids can be used to create genetically modified and transgenic organisms, usually plant cells and plants, which may be monocots or dicots. The term transgenic, as used herein, is defined as an organism into which an exogenous nucleic acid construct has been introduced, generally the exogenous sequences are stably maintained in the genome of the organism. Of particular interest are transgenic organisms where the genomic sequence of germ line cells has been stably altered by introduction of an exogenous construct.

[0100] Typically, the transgenic organism is altered in the genetic expression of the introduced nucleotide sequences as compared to the wild-type, or unaltered organism. For example, constructs that provide for over-expression of a targeted sequence, sometimes referred to as a “knock-in”, provide for increased levels of the gene product. Alternatively, expression of the targeted sequence can be down-regulated or substantially eliminated by introduction of a “knock-out” construct, which may direct transcription of an anti-sense RNA that blocks expression of the naturally occurring mRNA, by deletion of the genomic copy of the targeted sequence, etc.

[0101] In one method, large numbers of genes are simultaneously introduced in order to explore the genetic basis of complex traits, for example by making plant artificial chromosome (PLAC) libraries. The centromeres in Arabidopsis have been mapped and current genome sequencing efforts will extend through these regions. Because Arabidopsis telomeres are very similar to those in yeast one may use a hybrid sequence of alternating plant and yeast sequences that function in both types of organisms, developing yeast artificial chromosome-PLAC libraries, and then introducing them into a suitable plant host to evaluate the phenotypic consequences. By providing a defined chromosomal environment for cloned genes, the use of PLACs may also enhance the ability to produce transgenic plants with defined levels of gene expression.

[0102] It has been found in many organisms that there is significant redundancy in the representation of genes in a genome. That is, a particular gene function is likely by represented by multiple copies of similar coding sequences in the genome. These copies are typically conserved in the amino acid sequence, but may diverge in the sequence of non-translated sequences, and in their codon usage. In order to knock out a particular genetic function in an organism, it may not be sufficient to delete a genomic copy of a single gene. In such cases it may be preferable to achieve a genetic knock-out with an anti-sense construct, particularly where the sequence is aligned with the coding portion of the mRNA.

[0103] Methods of transforming plant cells are well-known in the art, and include protoplast transformation, tungsten whiskers (Coffee et al., U.S. Pat. No. 5,302,523, issued Apr. 12, 1994), directly by microorganisms with infectious plasmids, use of transposons (U.S. Pat. No. 5,792,294), infectious viruses, the use of liposomes, microinjection by mechanical or laser beam methods, by whole chromosomes or chromosome fragments, electroporation, silicon carbide fibers, and microprojectile bombardment.

[0104] For example, one may utilize the biolistic bombardment of meristem tissue, at a very early stage of development, and the selective enhancement of transgenic sectors toward genetic homogeneity, in cell layers that contribute to germline transmission. Biolistics-mediated production of fertile, transgenic maize is described in Gordon-Kamm et al. (1990), Plant Cell 2:603; Fromm et al. (1990) Bio/Technology 8: 833, for example. Alternatively, one may use a microorganism, including but not limited to, Agrobacterium tumefaciens as a vector for transforming the cells, particularly where the targeted plant is a dicotyledonous species. See, for example, U.S. Pat. No. 5,635,381. Leung et al. (1990) Curr. Genet. 17(5):409-11 describe integrative transformation of three fertile hermaphroditic strains of Arabidopsis thaliana using plasmids and cosmids that contain an E. coli gene linked to Aspergillus nidulans regulatory sequences.

[0105] Preferred expression cassettes for cereals may include promoters that are known to express exogenous DNAs in corn cells. For example, the Adhl promoter has been shown to be strongly expressed in callus tissue, root tips, and developing kernels in corn. Promoters that are used to express genes in corn include, but are not limited to, a plant promoter such as the, CaMV 35S promoter (Odell et al., Nature, 313, 810 (1985)), or others such as CaMV 19S (Lawton et al., Plant Mol. Biol., 9, 31F (1987)), nos (Ebert et al., PNAS USA, 84, 5745 (1987)), Adh (Walker et al., PNAS USA, 84, 6624 (1987)), sucrose synthase (Yang et al., PNAS USA, 87, 4144 (1990)), .alpha.-tubulin, ubiquitin, actin (Wang et al., Mol. Cell. Biol., 12, 3399 (1992)), cab (Sullivan et al., Mol. Gen. Genet, 215, 431 (1989)), PEPCase (Hudspeth et al., Plant Mol. Biol., 12, 579 (1989)), or those associated with the R gene complex (Chandler et al., The Plant Cell, 1, 1175 (1989)). Other promoters useful in the practice of the invention are known to those of skill in the art.

[0106] Tissue-specific promoters, including but not limited to, root-cell promoters (Conkling et al., Plant Physiol., 93, 1203 (1990)), and tissue-specific enhancers (Fromm et al., The Plant Cell, 1, 977 (1989)) are also contemplated to be particularly useful, as are inducible promoters such as water-stress-, ABA- and turgor-inducible promoters (Guerrero et al., Plant Molecular Biology, 15, 11-26)), and the like.

[0107] Regulating and/or limiting the expression in specific tissues may be functionally accomplished by introducing a constitutively expressed gene (all tissues) in combination with an antisense gene that is expressed only in those tissues where the gene product is not desired. Expression of an antisense transcript of this preselected DNA segment in an rice grain, using, for example, a zein promoter, would prevent accumulation of the gene product in seed. Hence the protein encoded by the preselected DNA would be present in all tissues except the kernel.

[0108] Alternatively, one may wish to obtain novel tissue-specific promoter sequences for use in accordance with the present invention. To achieve this, one may first isolate cDNA clones from the tissue concerned and identify those clones which are expressed specifically in that tissue, for example, using Northern blotting or DNA microarrays. Ideally, one would like to identify a gene that is not present in a high copy number, but which gene product is relatively abundant in specific tissues. The promoter and control elements of corresponding genomic clones may then be localized using the techniques of molecular biology known to those of skill in the art. Alternatively, promoter elements can be identified using enhancer traps based on T-DNA and/or transposon vector systems (see, for example, Campisi et al. (1999) Plant J. 17:699-707; Gu et al. (1998) Development 125:1509-1517).

[0109] In some embodiments of the present invention expression of a DNA segment in a transgenic plant will occur only in a certain time period during the development of the plant. Developmental timing is frequently correlated with tissue specific gene expression. For example, in corn expression of zein storage proteins is initiated in the endosperm about 15 days after pollination.

[0110] Ultimately, the most desirable DNA segments for introduction into a plant genome may be homologous genes or gene families which encode a desired trait (e.g., increased disease resistance) and which are introduced under the control of novel promoters or enhancers, etc., or perhaps even homologous or tissue-specific (e.g., root-, grain- or leaf-specific) promoters or control elements.

[0111] The genetically modified cells are screened for the presence of the introduced genetic material. The cells may be used in functional studies, drug screening, etc., e.g. to study chemical mode of action, to determine the effect of a candidate agent on pathogen growth, infection of plant cells, etc.

[0112] The modified cells are useful in the study of genetic function and regulation, for alteration of the cellular metabolism, and for screening compounds that may affect the biological function of the gene or gene product. For example, a series of small deletions and/or substitutions may be made in the hosts native gene to determine the role of different domains and motifs in the biological function. Specific constructs of interest include anti-sense, as previously described, which will reduce or abolish expression, expression of dominant negative mutations, and over-expression of genes.

[0113] Where a sequence is introduced, the introduced sequence may be either a complete or partial sequence of a gene native to the host, or may be a complete or partial sequence that is exogenous to the host organism, e.g., an A. thaliana sequence inserted into wheat plants. A detectable marker, such as aldA, lac Z, etc. may be introduced into the locus of interest, where upregulation of expression will result in an easily detected change in phenotype.

[0114] One may also provide for expression of the gene or variants thereof in cells or tissues where it is not normally expressed, at levels not normally present in such cells or tissues, or at abnormal times of development, during sporulation, etc. By providing expression of the protein in cells in which it is not normally produced, one can induce changes in cell behavior.

[0115] DNA constructs for homologous recombination will comprise at least a portion of the provided gene or of a gene native to the species of the host organism, wherein the gene has the desired genetic modification(s), and includes regions of homology to the target locus (see Kempin et al. (1997) Nature 389:802-803). DNA constructs for random integration or episomal maintenance need not include regions of homology to mediate recombination. Conveniently, markers for positive and negative selection are included. Methods for generating cells having targeted gene modifications through homologous recombination are known in the art.

[0116] Embodiments of the invention provide processes for enhancing or inhibiting synthesis of a protein in a plant by introducing a provided nucleic acids sequence into a plant cell, where the nucleic acid comprises sequences encoding a protein of interest. For example, enhanced resistance to pathogens may be achieved by inserting a nucleic acid encoding an activator in a vector downstream from a promoter sequence capable of driving constitutive high-level expression in a plant cell. When grown into plants, the transgenic plants exhibit increased synthesis of resistance proteins, and increased resistance to pathogens.

[0117] Other embodiments of the invention provide processes for enhancing or inhibiting synthesis of a tolerance factor in a plant by introducing a nucleic acid of the invention into a plant cell, where the nucleic acid comprises sequences encoding a tolerance factor. For example, enhanced tolerance to an environmental stress may be achieved by inserting a nucleic acid encoding an activator in a vector downstream from a promoter sequence capable of driving constitutive high-level expression in a plant cell. When grown into plants, the transgenic plants exhibit increased synthesis of tolerance proteins, and increased tolerance to environmental stress.

[0118] Factors which are involved, directly or indirectly in biosynthetic pathways whose products are of commercial, nutritional, or medicinal value include any factor, usually a protein or peptide, which regulates such a biosynthetic pathway (e.g., an activator or repressor); which is an intermediate in such a biosynthetic pathway; or which is a product that increases the nutritional value of a food product; a medicinal product; or any product of commercial value and/or research interest. Plant and other cells may be genetically modified to enhance a trait of interest, by upregulating or down-regulating factors in a biosynthetic pathway.

### SCREENING ASSAYS

[0119] The polypeptides encoded by the provided nucleic acid sequences, and cells genetically altered to express such sequences, are useful in a variety of screening assays to determine effect of candidate inhibitors, activators., or modifiers of the gene product. One may determine what insecticides, fungicides and the like have an enhancing or synergistic activity with a gene. Alternatively, one may screen for compounds that mimic the activity of the protein. Similarly, the effect of activating agents may be used to screen for compounds that mimic or enhance the activation of proteins. Candidate inhibitors of a particular gene product are screened by detecting decreased from the targeted gene product.

[0120] The screening assays may use purified target macromolecules to screen large compound libraries for inhibitory drugs; or the purified target molecule may be used for a rational drug design program, which requires first determining the structure of the macromolecular target or the structure of the macromolecular target in association with its customary substrate or ligand. This information is then used to design compounds which must be synthesized and tested further. Test results are used to refine the molecular models and drug design process in an iterative fashion until a lead compound emerges.

[0121] Drug screening may be performed using an in vitro model, a genetically altered cell, or purified protein. One can identify ligands or substrates that bind to, modulate or mimic the action of the target genetic sequence or its product. A wide variety of assays may be used for this purpose, including labeled in vitro protein-protein binding assays, electrophoretic mobility shift assays, immunoassays for protein binding, and the like. The purified protein may also be used for determination of three-dimensional crystal structure, which can be used for modeling intermolecular interactions.

[0122] Where the nucleic acid encodes a factor involved in a biosynthetic pathway, as described above, it may be desirable to identify factors, e.g., protein factors, which interact with such factors. One can identify interacting factors, ligands, substrates that bind to, modulate or mimic the action of the target genetic sequence or its product. A wide variety of assays may be used for this purpose, including labeled in vitro protein-protein binding assays, electrophoretic mobility shift assays, immunoassays for protein binding, and the like. In vivo assays for protein-protein interactions in E. coli and yeast cells are also well-established (see Hu et al. (2000) Methods 20:80-94; and Bai and Elledge (1997) Methods Enzymol. 283:141-156).

[0123] The purified protein may also be used for determination of three-dimensional crystal structure, which can be used for modeling intermolecular interactions. It may also be of interest to identify agents that modulate the interaction of a factor identified as described above with a factor encoded by a nucleic acid of the invention. Drug screening can be performed to identify such agents. For example, a labeled in vitro protein-protein binding assay can be used, which is conducted in the presence and absence of an agent being tested.

[0124] The term “agent” as used herein describes any molecule, e.g. protein or pharmaceutical, with the capability of altering or mimicking a physiological function. Generally a plurality of assay mixtures are run in parallel with different agent concentrations to obtain a differential response to the various concentrations. Typically, one of these concentrations serves as a negative control, i.e. at zero concentration or below the level of detection.

[0125] Candidate agents encompass numerous chemical classes, though typically they are organic molecules, preferably small organic compounds having a molecular weight of more than 50 and less than about 2,500 daltons. Candidate agents comprise functional groups necessary for structural interaction with proteins, particularly hydrogen bonding, and typically include at least an amine, carbonyl, hydroxyl or carboxyl group, preferably at least two of the functional chemical groups. The candidate agents often comprise cyclical carbon or heterocyclic structures and/or aromatic or polyaromatic structures substituted with one or more of the above functional groups. Candidate agents are also found among biomolecules including peptides, saccharides, fatty acids, steroids, purines, pyrimidines, derivatives, structural analogs or combinations thereof.

[0126] Candidate agents are obtained from a wide variety of sources including libraries of synthetic or natural compounds. For example, numerous means are available for random and directed synthesis of a wide variety of organic compounds and biomolecules, including expression of randomized oligonucleotides and oligopeptides. Alternatively, libraries of natural compounds in the form of bacterial, fungal, plant and organism extracts are available or readily produced. Additionally, natural or synthetically produced libraries and compounds are readily modified through conventional chemical, physical and biochemical means, and may be used to produce combinatorial libraries. Known pharmacological agents may be subjected to directed or random chemical modifications, such as acylation, alkylation, esterification, amidification, etc. to produce structural analogs.

[0127] Where the screening assay is a binding assay, one or more of the molecules may be joined to a label, where the label can directly or indirectly provide a detectable signal. Various labels include radioisotopes, fluorescers, chemiluminescers, enzymes, specific binding molecules, particles, e.g. magnetic particles, and the like. Specific binding molecules include pairs, such as biotin and streptavidin, digoxin and antidigoxin etc. For the specific binding members, the complementary member would normally be labeled with a molecule that provides for detection, in accordance with known procedures.

[0128] A variety of other reagents may be included in the screening assay. These include reagents like salts, neutral proteins, e.g. albumin, detergents, etc that are used to facilitate optimal protein-protein binding and/or reduce non-specific or background interactions. Reagents that improve the efficiency of the assay, such as protease inhibitors, nuclease inhibitors, anti-microbial agents, etc. may be used. The mixture of components are added in any order that provides for the requisite binding. Incubations are performed at any suitable temperature, typically between 4 and 40° C. Incubation periods are selected for optimum activity, but may also be optimized to facilitate rapid high-throughput screening. Typically between 0.1 and 1 hours will be sufficient.

[0129] The compounds having the desired biological activity may be administered in an acceptable carrier to a host. The active agents may be administered in a variety of ways. Depending upon the manner of introduction, the compounds may be formulated in a variety of ways. The concentration of therapeutically active compound in the formulation may vary from about 0.01-100 wt. %.

[0130] It must be noted that as used herein and in the appended claims, the singular forms “a”, “and”, and “the” include plural referents unless the context clearly dictates otherwise. Thus, for example, reference to “a complex” includes a plurality of such complexes and reference to the formulation includes reference to one or more formulations and equivalents thereof known to those skilled in the art, and so forth.

[0131] Unless defined otherwise, all technical and scientific terms used herein have the same meaning as commonly understood to one of ordinary skill in the art to which this invention belongs. Although any methods, devices and materials similar or equivalent to those described herein can be used in the practice or testing of the invention, the preferred methods, devices and materials are now described.

[0132] All publications mentioned herein are incorporated herein by reference for the purpose of describing and disclosing, for example, the methods and methodologies that are described in the publications which might be used in connection with the presently described invention. The publications discussed above and throughout the text are provided solely for their disclosure prior to the filing date of the present application. Nothing herein is to be construed as an admission that the inventors are not entitled to antedate such disclosure by virtue of prior invention.

[0133] The following examples are put forth so as to provide those of ordinary skill in the art with a complete disclosure and description of how to make and use the subject invention, and are not intended to limit the scope of what is regarded as the invention. Efforts have been made to ensure accuracy with respect to the numbers used (e.g. amounts, temperature, concentrations, etc.) but some experimental errors and deviations should be allowed for. Unless otherwise indicated, parts are parts by weight, molecular weight is average molecular weight, temperature is in degrees Celsius, and pressure is at or near atmospheric.

### EXPERIMENTAL

### Cloning and Characterization of Arabidopsis thaliana Genes

[0134] Following DNA isolation, sequencing was performed using the Dye Primer Sequencing protocol, below. The sequencing reactions were loaded by hand onto a 48 lane ABI 377 and run on a 36 cm gel with the 36E-2400 run module and extraction. Gel analysis was performed with ABI software.

[0135] The Phred program was used to read the sequence trace from the ABI sequencer, call the bases and produce a sequence read and a quality score for each base call in the sequence., (Ewing et al. (1998) Genome Research 8:175-185; Ewing and Green (1998) Genome Research 8:186-194.) PolyPhred may be used to detect single nucleotide polymorphisms in sequences (Kwok et al. (1994) Genomics 25:615-622; Nickerson et al. (1997) Nucleic Acids Research 25(14):2745-2751.)

[0136] MicroWave Plasmid Protocol: Fill Beckman 96 deep-well growth blocks with 1 ml of TB containing 50 μg of ampicillin per ml. Inoculate each well with a colony picked with a toothpick or a 96-pin tool from a glycerol stock plate. Cover the blocks with a plastic lid and tape at two ends to hold lid in place. Incubate overnight (16-24 hours depending on the host stain) at 37° C. with shaking at 275 rpm in a New Brunswick platform shaker. Pellet cells by centrifugation for 20 minutes at 3250 rpm in a Beckman GS-R6K, decant TB and freeze pelleted cell in the 96 well block. Thaw blocks on the bench when ready to continue.

[0137] Prepare the MW-Tween20 solution

| For four blocks: | For 16 blocks: |
|---|---|
| 50 ml STET/TWEEN 20 | 200 ml STET/TWEEN |
| 2 tubes RNAse (10 mg/ml, 600 ul ea) | 8 tubes RNAse |
| 1 tube lysozyme (25 mg) | 4 tubes lysozyme |

[0138] Pipette RNAse and Lysozyme into the corner of a beaker. Add Tween 20 solution and swirl to mix completely. Use the Multidrop (or Biohit) to add 25 ul of sterile H₂O (from the L size autoclaved bottles) to each well. Resuspend the pellets by vortexing on setting 10 of the platform vortexer. Check pellets after 4 min. and repeat as necessary to resuspend completely. Use the multidrop to add 70 μl of the freshly prepared MW-Tween 20 solution to each well. Vortex at setting 6 on the platform vortex for 15 seconds. Do not cause frothing.

[0139] Incubate the blocks at room temperature for 5 min. Place two blocks at a time in the microwave (1000 Watts) with the tape (placed on the H1 to H12 side of the block) facing away from each other and turn on at full power for 30 seconds. Rotate the blocks so that the tapes face towards each other and turn on at full power again for 30 seconds.

[0140] Immediately remove the blocks from the microwave and add 300 μl of sterile ice cold H₂O with the Multidrop. Seal the blocks with foil tape and place them in an H₂O/ice bath.

[0141] Vortex the blocks on 5 for 15 seconds and leave them in the H₂O/Ice bath. Return to step 7 until all the blocks are in the ice water bath. Incubate the blocks for 15 minutes on ice. Spin the blocks for 30 minutes in the Beckman GS-6KR with GH3.8 rotor with Microplus carrier at 3250 rpm.

[0142] Transfer 100 μl of the supernatant to Corning/Costar round bottom 96 well trays. Cover with foil and put into fridge if to be sequenced right away. If not to be sequenced in the next day, freeze them at −20° C.

[0143] Dye Primer Sequencing: Spin down the DP brew trays and DNA template by pulsing in the Beckman GS-6KR with GH3.8 rotor with Microplus carrier. Big Dye Primer reaction mix trays (one 96 well cycleplate (Robbins) for each nucleotide), 3 microliters of reaction mix per well.

[0144] Use twelve channel pipetter (Costar) to add 2 μl of template to one each G, A, T, C, trays for each template plate. Pulse again to get both the reaction mix and template into the bottom of the cycle plate and put them into the MJ Research DNA Tetrad (PTC-225).

[0145] Start program Dye-Primer. Dye-primer is:

[0146] 96° C., 1 min 1 cycle

[0147] 96° C., 10 sec.

[0148] 55° C., 5 sec.

[0149] 70° C., 1 min 15 cycles

[0150] 96° C., 10 sec.

[0151] 70° C., 1 min. 15 cycles

[0152] 4° C. soak

[0153] When done cycling, using the Robbins Hydra 290 add 100 μl of 100% ethanol to the A reaction cycle plate and pool the contents of all four cycle plates into the appropriate well.

[0154] To perform ethanol precipitation: Use Hydra program 4 to add 100 μl 100% ethanol to each A tray. Use Hydra program 5 to transfer the ethanol and therefore combine the samples from plate to plate. Once the G, A, T, and C trays of each block are mixed, spin for 30 minutes at 3250 in the Beckman. Pour off the ethanol with a firm shake and blot on a paper towel before drying in the speed vac (˜10 minutes or until dry). If ready to load add 3 μl dye and denature in the oven at 95° C. for ˜5 minutes and load 2 μl. If to store, cover with tape and store at −20° C.

[0155] Common Solutions

[0156] Terrific Broth

[0157] Per liter:

[0158] 900 ml H₂O

[0159] 12 g bacto tryptone

[0160] 24 g bacto-yeast extract

[0161] 4 ml glycerol

[0162] Shake until dissolved and then autoclave. Allow the solution to cool to 60° C. or less and then add 100 ml of sterile 0.17M KH₂PO₄, 0.72M K₂HPO₄ (in the hood w/sterile technique).

[0163] 0.17M KH₂PO₄, 0.72M K₂HPO₄

[0164] Dissolve 2.31 g of KH₂PO₄ and 12.54 g of K₂HPO₄ in 90 ml of H₂O.

[0165] Adjust volume to 100 ml with H₂O and autoclave.

[0166] Sequence loading Dye

[0167] 20 ml deionized formamide

[0168] 3.6 ml dH₂O

[0169] 400 μl 0.5M EDTA, pH 8.0

[0170] 0.2 g Blue Dextran

[0171] *Light sensitive, cover in foil or store in the dark.

[0172] STET/TWEEN

[0173] 10 ml 5M NaCl

[0174] 5 ml 1M Tris, pH 8.0

[0175] 1 ml 0.5M EDTA., pH 8.0

[0176] 25 ml Tween20

[0177] Bring volume to 500 ml with H₂O

[0178] The sequencing reactions are run on an ABI 377 sequencer per manufacturer's' instructions. The sequencing information obtained each run are analyzed as follows.

[0179] Sequencing reads are screened for ribosomal., mitochondrial., chloroplast or human sequence contamination. In good sequences, vector is marked by x's. These sequences go into biolims regardless of whether or not they pass the criteria for a ‘good’ sequence. This criteria is >=100 bases with phred score of >=20 and 15 of these bases adjacent to each other.

[0180] Sequencing reads that pass the criteria for good sequences are downloaded for assembly into consensus sequences (contigs). The program Phrap (copyrighted by Phil Green at University of Washington, Seattle, Wash.) utilizes both the Phred sequence information and the quality calls to assemble the sequencing reads. Parameters used with Phrap were determined empirically to minimize assembly of chimeric sequences and maximize differential detection of closely related members of gene families. The following parameters were used with the Phrap program to perform the assembly:

| | | |
|---|---|---|
| Penalty | −6 | Penalty for mismatches(substitutions) |
| Minmatch | 40 | Minimum length of matching sequence to use in |
| | | assembly of reads |
| Trim penalty | 0 | penalty used for identifying degenerate sequence at |
| | | beginning and end of read. |
| Minscore | 80 | Minimum alignment score |

[0181] Results from the Phrap analysis yield either contigs consisting of a consensus of two or more overlapping sequence reads, or singlets that are non-overlapping.

[0182] The contig and singlets assembly were further analyzed to eliminate low quality sequence utilizing a program to filter sequences based on quality scores generated by the Phred program. The threshold quality for “high quality” base calls is 20. Sequences with less than 50 contiguous high quality bases calls at the beginning of the sequence, and also at the end of the sequence were discarded. Additionally, the maximum allowable percentage of “low quality base calls in the final sequence is 2%, otherwise the sequence is discarded.

[0183] The stand-alone BLAST programs and Genbank databases were downloaded from NCBI for use on secure servers at the Paradigm Genetics, Inc. site. The sequences from the assembly were compared to the GenBank NR database downloaded from NCBI using the gapped version (2.0) of BLASTX. BLASTX translates the DNA sequence in all six reading frames and compares it to an amino acid database. Low complexity sequences are filtered in the query sequence. (Altschul et al. (1997) Nucleic Acids Res 25(17):3389-402).

[0184] Genbank sequences found in the BLASTX search with an E Value of less than 1e⁻¹⁰ are considered to be highly similar, and the Genbank definition lines were used to annotate the query sequences.

[0185] When no significantly similar sequences were found as a result of the BLASTX search, the query sequences were compared with the PROSITE database (Bairoch, A. (1992) PROSITE: A dictionary of sites and patterns in proteins. Nucleic Acids Research 20:2013-2018.) to locate functional motifs.

[0186] Query sequences were first translated in six reading frames using the Wisconsin GCG pepdata program (Wisconsin Package Version 10.0, Genetics Computer Group (GCG) , Madison, Wis., USA.). The Wisconsin GCG motifs program (Wisconsin Package Version 10.0, Genetics Computer Group (GCG), Madison, Wis., USA.) was used to locate motifs in the peptide sequence, with no mismatches allowed. Motif names from the PROSITE results were used to annotate these query sequences.

TABLE 1

| SEQ ID | Reference | Annotation |
|---|---|---|
| 1 | 2027001 | Rgd(605-607) |
| 2 | 2027002 | 1E-35 >sp\|Q96253\|ATP5_ARATH ATP SYNTHASE EPSILON CHAIN, |
| | | MITOCHONDRIAL >gi\|1655486\|dbj\|BAA13602\| (D88377) epsilon subunit of |
| | | mitochondrial F1-ATPase [Arabidopsis thaliana] Length = 70 |
| 3 | 2027003 | 1E-113 ) >emb\|CAB42912.1\| (AL049862) cold acclimation protein |
| | | [Arabidopsis thaliana] Length = 203 |
| 4 | 2027004 | 5E-71 >emb\|CAA10173\| (AJ012796) ss-galactosidase [Lycopersicon |
| | | esculentum] Length = 838 |
| 5 | 2027005 | 5E-50 >emb\|CAB16790.1\| (Z99707) methionyl aminopeptidase-like protein |
| | | [Arabidopsis thaliana] Length = 305 |
| 6 | 2027006 | 3′ Pkc_Phospho_Site(9-11) |
| 7 | 2027007 | 3′ Pkc_Phospho_Site(53-55) |
| 8 | 2027008 | 3′ Pkc_Phospho_Site(7-9) |
| 9 | 2027009 | 5′ Pkc_Phospho_Site(4-6) |
| 10 | 2027010 | 5′ 9E-61 >gi\|4263695\|gb\|AAD15381\| (AC006223) myosin II heavy chain |
| | | [Arabidopsis thaliana] Length = 1269 |
| 11 | 2027011 | 5′ Pkc_Phospho_Site(3-5) |
| 12 | 2027012 | 5′ 1E-27 >gi\|2316016 (U92650) MRP-like ABC transporter |
| | | [Arabidopsis thaliana] Length = 1515 |
| 13 | 2027013 | 5′ 2E-73 >gi\|5107033\|gb\|AAD39930.1\|AF133708_1 (AF133708) PP2A |
| | | regulatory subunit [Arabidopsis thaliana] Length = 405 |
| 14 | 2027014 | 5′ 4E-37 >gi\|3913682\|sp\|Q50228\|FMDA_METME FORMAMIDASE |
| | | (FORMAMIDE AMIDOHYDROLASE) >gi\|1480105\|emb\|CAA67953\|(X99632) |
| | | formamidase [Methylophilus methylotrophus] Length = 407 |
| 15 | 2027015 | Tyr_Phospho_Site(487-494) |
| 16 | 2027016 | Pkc_Phospho_Site(25-27) |
| 17 | 2027017 | 9E-23 >ref\|NP_003301.1\|PTSSC1\| tumor suppressing subtransferable candidate |
| | | 1 >gi\|2655037\|gb\|AAC51911\| (AF019952) tumor suppressing STF cDNA 1 [Homo |
| | | sapiens] Length = 387 |
| 18 | 2027018 | Tyr_Phospho_Site(1056-1063) |
| 19 | 2027019 | 9E-89 >emb\|CAB41170.1\| (AL049659) Cytochrome P450-like protein |
| | | [Arabidopsis thaliana] Length = 490 |
| 20 | 2027020 | 6E-14 >gb\|AAD31931.1\|U00031_10 (U00031) Contains similarity to Pfam |
| | | domain: PF00957 (synaptobrevin), Score=100.3, E-value=1.2e-26, N=1 |
| | | [Caenorhabditis elegans] Length = 543 |
| 21 | 2027021 | 6E-22 >emb\|CAB16828.1\| (Z99708) splicing factor-like protein [Arabidopsis |
| | | thaliana] Length = 573 |
| 22 | 2027022 | 5E-51 >pir∥B55017 porin, plastid - garden pea Length = 275 |
| 23 | 2027023 | Pkc_Phospho_Site(48-50) |
| 24 | 2027024 | 1E-80 >gi\|2952433 (AF051135) ubiquitin activating enzyme E1 |
| | | [Arabidopsis thaliana] Length = 454 |
| 25 | 2027025 | 4E-75 >gb\|AAD17805\| (AF092432) protein phosphatase type 2C [Lotus |
| | | japonicus] Length = 282 |
| 26 | 2027026 | 2E-39 >gi\|2388582 (AC000098) Contains similarity to Rattus O-GlcNAc |
| | | transferase (gb\|U76557). [Arabidopsis thaliana] Length = 808 |
| 27 | 2027027 | 4E-46 >gi\|2829899 (AC002311) similar to ripening-induced protein, |
| | | gp\|AJ001449\|2465015 and major#latex protein, gp\|X91961\|1107495 [Arabidopsis |
| | | thaliana] Length = 160 |
| 28 | 2027028 | 3E-45 >sp\|Q42472\|DCE2_ARATH GLUTAMATE DECARBOXYLASE 2 (GAD |
| | | 2) >gi\|1184960 (U46665) glutamate decarboxylase 2 [Arabidopsis thaliana] |
| | | >gi\|1236619 (U49937) glutamate decarboxylase [Arabidopsis thaliana] Length = |
| | | 494 |
| 29 | 2027029 | Pkc_Phospho_Site(27-29) |
| 30 | 2027030 | 3′ 3E-53 >gi\|6056388\|gb\|AAF02852.1\|AC009324_1 (AC009324) 26S |
| | | proteasome ATPase subunit [Arabidopsis thaliana] Length = 426 |
| 31 | 2027031 | 3′ Pkc_Phospho_Site(9-11) |
| 32 | 2027032 | 3′ Tub_2(584-599) |
| 33 | 2027033 | 5′ Tyr_Phospho_Site(381-387) |
| 34 | 2027034 | 5′ Pkc_Phospho_Site(65-67) |
| 35 | 2027035 | 5′ Pkc_Phospho_Site(68-70) |
| 36 | 2027036 | Tyr_Phospho_Site(187-193) |
| 37 | 2027037 | 3E-58 >gi\|3176660 (AC004393) Similar to ERECTA receptor protein |
| | | kinase gb\|U47029 from A. thaliana. [Arabidopsis thaliana] Length = 719 |
| 38 | 2027038 | 1E-139 >emb\|CAA04265\| (AJ000732) shaggy-like kinase alpha |
| | | [Arabidopsis thaliana] Length = 405 |
| 39 | 2027039 | 1E-126 >emb\|CAA11858\| (AJ224161) delta-8 sphingolipid desaturase |
| | | [Arabidopsis thaliana] Length = 449 |
| 40 | 2027040 | 4E-33 >emb\|CAB43635.1\| (AL050351) ribosomal protein S25 [Arabidopsis |
| | | thaliana] Length = 108 |
| 41 | 2027041 | 5E-20 >gi\|1388088 (U35831) thioredoxin m [Pisum sativum] Length = |
| | | 172 |
| 42 | 2027042 | Tyr_Phospho_Site(151-158) |
| 43 | 2027043 | Pkc_Phospho_Site(2-4) |
| 44 | 2027044 | 8E-52 >gi\|832876 (L41345) ascorbate free radical reductase [Solanum |
| | | lycopersicum] >gi\|1097368\|prf∥2113407A ascorbate free radical reductase |
| | | [Lycopersicon esculentum] Length = 433 |
| 45 | 2027045 | Zinc_Finger_C2h2(982-1004) |
| 46 | 2027046 | 4E-26 >gb\|AAD56995.1\|AC009465_9 (AC009465) cysteine synthase |
| | | [Arabidopsis thaliana] Length = 399 |
| 47 | 2027047 | 5′ 2E-91 >gi\|1076331\|pir∥S46236 histidine transport protein - Arabidopsis |
| | | thaliana >gi\|510238\|emb\|CAA54634\| (X77503) oligopeptide transporter 1-1 |
| | | [Arabidopsis thaliana] >gi\|744157\|prf∥2014244A His transporter [Arabidopsis |
| | | thaliana] Length = 586 |
| 48 | 2027048 | 5′ Pkc_Phospho_Site(15-17) |
| 49 | 2027049 | 5′ 7E-80 >gi\|2129733\|pir∥S69192 serine O-acetyltransferase (EC 2.3.1.30) |
| | | SAT1 precursor - Arabidopsis thaliana >gi\|1184048 (U22964) serine |
| | | acetyltransferase [Arabidopsis thaliana] Length = 391 |
| 50 | 2027050 | 5′ 4E-27 >gi\|4886264\|emb\|CAB43399.1\| (AJ006292) Myb-related transcription |
| | | factor mixta-like 1 [Antirrhinum majus] Length = 359 |
| 51 | 2027051 | 5′ Tyr_Phospho_Site(94-102) |
| 52 | 2027052 | 9E-26 >pdb\|1SOX\|A Chain A, Sulfite Oxidase From Chicken Liver |
| | | >gi\|3212611\|pdb\|1SOX\|B Chain B, Sulfite Oxidase From Chicken Liver Length = |
| | | 466 |
| 53 | 2027053 | Pkc_Phospho_Site(66-68) |
| 54 | 2027054 | Tyr_Phospho_Site(786-793) |
| 55 | 2027055 | Tyr_Phospho_Site(642-649) |
| 56 | 2027056 | 3E-64 >dbj\|BAA11682\| (D83025) proline oxidase precursor [Arabidopsis |
| | | thaliana] Length = 499 |
| 57 | 2027057 | 4E-92 >gi\|2317904 (U89959) Similar to rice chalcone synthase homolog, |
| | | gp\|U90341\|2507617 and anther specific protein, gp\|Y14507\|2326772 [Arabidopsis |
| | | thaliana] Length = 395 |
| 58 | 2027058 | 3E-76 >sp\|P28147\|TF21_ARATH TRANSCRIPTION INITIATION FACTOR |
| | | TFIID-1 (TATA-BOX FACTOR 1) (TATA SEQUENCE-BINDING PROTEIN 1) |
| | | (TBP-1) >gi\|99763\|pir∥S10946 transcription initiation factor IID (clone At-2) - |
| | | Arabidopsis thaliana >gi\|1943466\|pdb\|1VOK\|A Chain A, Arabidopsis Thaliana Tbp |
| | | (Dimer) >gi\|1943467\|pdb\|1VOK\|B Chain B, Arabidopsis Thaliana Tbp (Dimer) |
| | | >gi\|1943469\|pdb\|1VOL\|B Chain B, Tfiib (Human Core Domain)TBP |
| | | (A. THALIANA)TATA ELEMENT Ternary Complex >gi\|16548\|emb\|CAA38743\| |
| | | (X54996) transcription initiation factor II [Arabidopsis thaliana] |
| | | >gi\|227074\|prf∥1613452B transcription initiation factor TFIID-2 [Arabidopsis |
| | | thaliana] Length = 200 |
| 59 | 2027059 | Pkc_Phospho_Site(54-56) |
| 60 | 2027060 | Tyr_Phospho_Site(187-195) |
| 61 | 2027061 | 1E-116 >gi\|3540183 (AC004122) Highly Similar to branched-chain amino |
| | | acid aminotransferase [Arabidopsis thaliana] Length = 318 |
| 62 | 2027062 | 3E-80 >emb\|CAB16753.1\| (Z99707) cytochrome P450-like protein |
| | | [Arabidopsis thaliana] Length = 492 |
| 63 | 2027063 | 1E-123 >emb\|CAB45452.1\| (AL079347) RNA helicase (RH16) [Arabidopsis |
| | | thaliana] Length = 626 |
| 64 | 2027064 | 2E-23 >sp\|Q40412\|ABA2_NICPL ZEAXANTHIN EPOXIDASE PRECURSOR |
| | | >gi\|2129941\|pir∥S69548 zeaxanthin epoxidase precursor - curled-leaved tobacco |
| | | >gi\|1370274\|emb\|CAA65048\| (X95732) zeaxanthin epoxidase [Nicotiana |
| | | plumbaginifolia] Length = 663 |
| 65 | 2027065 | Pkc_Phospho_Site(25-27) |
| 66 | 2027066 | Tyr_Phospho_Site(413-420) |
| 67 | 2027067 | 3′ 1E-20 >gi\|2129754\|pir∥S62701 translation elongation factor Tu precursor - |
| | | Arabidopsis thaliana >gi\|1149571\|emb\|CAA61511\| (X89227) mitochondrial |
| | | elongation factor Tu [Arabidopsis thaliana] Length = 471 |
| 68 | 2027068 | 3′ 9E-44 >gi\|81601\|pir∥JT0901 chaperonin 60 beta - Arabidopsis thaliana |
| | | Length = 600 |
| 69 | 2027069 | 3′ 2E-54 >gi\|2149380 (U85036) syntaxin homolog [Arabidopsis |
| | | thaliana] >gi\|5281026\|emb\|CAB10553.2\| (Z97344) syntaxin [Arabidopsis thaliana] |
| | | Length = 255 |
| 70 | 2027070 | 5′ 6E-51 >gi\|2104536\|gb\|AAC78704.1\| (AF001308) predicted glycosyl |
| | | transferase [Arabidopsis thaliana] Length = 346 |
| 71 | 2027071 | 5′ Tyr_Phospho_Site(601-608) |
| 72 | 2027072 | 5′ Tyr_Phospho_Site(197-204) |
| 73 | 2027073 | 5′ 7E-73 >gi\|1698548 (U58971) calmodulin-binding protein [Nicotiana |
| | | tabacum] Length = 551 |
| 74 | 2027074 | 5′ Pkc_Phospho_Site(14-16) |
| 75 | 2027075 | 5′ Pkc_Phospho_Site(28-30) |
| 76 | 2027076 | 6E-29 >dbj\|BAA34687\|(AB016819) UDP-glucose glucosyltransferase |
| | | [Arabidopsis thaliana] Length = 481 |
| 77 | 2027077 | 6E-66 >gb\|AAF00654.1\|AC008153_6 (AC008153) eukaryotic translation initiation |
| | | factor 3 subunit [Arabidopsis thaliana] Length = 294 |
| 78 | 2027078 | Pkc_Phospho_Site(2-4) |
| 79 | 2027079 | Pkc_Phospho_Site(61-63) |
| 80 | 2027080 | Rgd(420-422) |
| 81 | 2027081 | 2E-30 >gi\|3355480 (AC004218) Medicago nodulin N21-like protein |
| | | [Arabidopsis thaliana] Length = 374 |
| 82 | 2027082 | 6E-89 >emb\|CAA09196\| (AJ010457) RNA helicase [Arabidopsis thaliana] |
| | | Length = 748 |
| 83 | 2027083 | 7E-91 >gi\|3128210 (AC004077) cytochrome P450 protein [Arabidopsis |
| | | thaliana] >gi\|3337378 (AC004481) cytochrome P450 protein [Arabidopsis |
| | | thaliana] Length = 495 |
| 84 | 2027084 | 2E-48 >emb\|CAA22974.1\| (AL035353) Proline-rich APG-like protein |
| | | [Arabidopsis thaliana] Length = 367 |
| 85 | 2027085 | 1E-48 >gb\|AAD17441\| (AC006284) WRKY DNA-binding protein |
| | | [Arabidopsis thaliana] Length = 513 |
| 86 | 2027086 | Tyr_Phospho_Site(98-105) |
| 87 | 2027087 | 1E-125 >gi\|2316022 (U96399) MRP-like ABC transporter [Arabidopsis |
| | | thaliana] Length = 245 |
| 88 | 2027088 | Pkc_Phospho_Site(52-54) |
| 89 | 2027089 | Pkc_Phospho_Site(117-119) |
| 90 | 2027090 | Pkc_Phospho_Site(27-29) |
| 91 | 2027091 | 9E-46 >emb\|CAA67885\| (X99548) bHLH protein [Arabidopsis thaliana] |
| | | Length = 623 |
| 92 | 2027092 | Tyr_Phospho_Site(704-712) |
| 93 | 2027093 | Tyr_Phospho_Site(932-940) |
| 94 | 2027094 | 8E-18 >pir∥S57462 small GTP-binding protein - garden pea |
| | | >gi\|871506\|emb\|CAA90081\| (Z49901) small GTP-binding protein [Pisum sativum] |
| | | Length = 215 |
| 95 | 2027095 | 4E-85 >gb\|AAD39317.1\|AC007258_6 (AC007258) Similar to nitrate and |
| | | oligopeptide transporters [Arabidopsis thaliana] Length = 474 |
| 96 | 2027096 | Tyr_Phospho_Site(838-845) |
| 97 | 2027097 | 1E-109 >emb\|CAB10259.1\| (Z97337) proteasome chain protein |
| | | [Arabidopsis thaliana] >gi\|2511572\|emb\|CAA73618.1\| (Y13175) multicatalytic |
| | | endopeptidase [Arabidopsis thaliana] >gi\|3421114 (AF043535) 20S proteasome |
| | | beta subunit PBD2 [Arabidopsis thaliana] Length = 199 |
| 98 | 2027098 | 3′ Pkc_Phospho_Site(14-16) |
| 99 | 2027099 | 3′ Pkc_Phospho_Site(4-6) |
| 100 | 2027100 | 3′ 9E-44 >gi\|6446577\|gb\|AAD39534.2\| (AF150630) cellulose synthase catalytic |
| | | subunit [Gossypium hirsutum] Length = 1067 |
| 101 | 2027101 | 3′ 5E-34 >gi\|404688 (L19074) cytochrome P450 [Catharanthus |
| | | roseus] Length = 524 |
| 102 | 2027102 | 5′ Tyr_Phospho_Site(458-466) |
| 103 | 2027103 | 5′ Tyr_Phospho_Site(453-461) |
| 104 | 2027104 | 5′ Pkc_Phospho_Site(12-14) |
| 105 | 2027105 | 5′ 4E-77 >gi\|629840\|pir∥S43328 tubulin beta-7 chain - maize >gi\|416149 |
| | | (L10634) beta-7 tubulin [Zea mays] Length = 445 |
| 106 | 2027106 | 5′ Tyr_Phospho_Site(83-89) |
| 107 | 2027107 | 5′ Rgd(538-540) |
| 108 | 2027108 | 5′ 8E-79 >gi\|2529663 (AC002535) lysophospholipase [Arabidopsis |
| | | thaliana] >gi\|3738277 (AC005309) lysophospholipase [Arabidopsis thaliana] |
| | | Length = 326 |
| 109 | 2027109 | 5′ Tyr_Phospho_Site(594-601) |
| 110 | 2027110 | 5′ Pkc_Phospho_Site(13-15) |
| 111 | 2027111 | Pkc_Phospho_Site(7-9) |
| 112 | 2027112 | Tyr_Phospho_Site(47-53) |
| 113 | 2027113 | Pkc_Phospho_Site(290-292) |
| 114 | 2027114 | 8E-38 >gb\|AAD20713\| (AC006300) cellulose synthase catalytic subunit |
| | | [Arabidopsis thaliana] Length = 1065 |
| 115 | 2027115 | Pkc_Phospho_Site(6-8) |
| 116 | 2027116 | Tyr_Phospho_Site(814-821) |
| 117 | 2027117 | Pkc_Phospho_Site(26-28) |
| 118 | 2027118 | 6E-79 >gi\|2191159 (AF007270) Similar to serine |
| | | hydroxymethyltransferase; coded for by A. thaliana cDNA T42313; coded for by A. |
| | | thaliana cDNA W43384 [Arabidopsis thaliana] Length = 532 |
| 119 | 2027119 | Tyr_Phospho_Site(442-448) |
| 120 | 2027120 | Pkc_Phospho_Site(6-8) |
| 121 | 2027121 | 7E-71 >gi\|3128205(AC004077) pyruvate dehydrogenase complex E1 |
| | | beta subunit [Arabidopsis thaliana] >gi\|5702375\|gb\|AAD47282.1\|AF167983_1 |
| | | (AF167983) pyruvate dehydrogenase beta subunit [Arabidopsis thaliana] Length = |
| | | 406 |
| 122 | 2027122 | Tyr_Phospho_Site(491-498) |
| 123 | 2027123 | 1E-61 >emb\|CAB37562\|(AL035538) protein [Arabidopsis thaliana] Length = |
| | | 753 |
| 124 | 2027124 | 1E-105 >emb\|CAA10321\| (AJ131206) microbody NAD-dependent malate |
| | | dehydrogenase [Arabidopsis thaliana] Length = 354 |
| 125 | 2027125 | Tyr_Phospho_Site(462-468) |
| 126 | 2027126 | 1E-21 >gi\|2622711 (AE000918) ferripyochelin binding protein |
| | | [Methanobacterium thermoautotrophicum] Length = 151 |
| 127 | 2027127 | Pkc_Phospho_Site(14-16) |
| 128 | 2027128 | 3′ Tyr_Phospho_Site(473-480) |
| 129 | 2027129 | 3′ Tyr_Phospho_Site(468-474) |
| 130 | 2027130 | 5′ Tyr_Phospho_Site(297-303) |
| 131 | 2027131 | 5′ 1E-48 >gi\|4210332\|emb\|CAA11553\| (AJ223803) 2-oxoglutarate |
| | | dehydrogenase E2 subunit [Arabidopsis thaliana] Length = 462 |
| 132 | 2027132 | 5′ Pkc_Phospho_Site(71-73) |
| 133 | 2027133 | 5′ Tyr_Phospho_Site(335-342) |
| 134 | 2027134 | 5′ 2E-41 >gi\|3123745\|dbj\|BAA25999\| (AB013447) aluminum-induced [Brassica |
| | | napus] Length = 244 |
| 135 | 2027135 | 5′ Pkc_Phospho_Site(33-35) |
| 136 | 2027136 | 5′ 5E-38 >gi\|2632252\|emb\|CAA73067\| (Y12464) serine/threonine kinase |
| | | [Sorghum bicolor] Length = 440 |
| 137 | 2027137 | 6E-55 >gb\|AAD39637.1\|AC007591_2 (AC007591) Contains similarity to |
| | | gb\|AF014403 type-2 phosphatidic acid phosphatase alpha-2 (PAP2_a2) from |
| | | Homo sapiens. ESTs gb\|T88254 and gb\|AA394650 come from this gene. |
| | | [Arabidopsis thaliana] Length = 290 |
| 138 | 2027138 | 1E-51 >gi\|1706958 (U58284) cellulose synthase [Gossypium hirsutum] |
| | | Length = 685 |
| 139 | 2027139 | 1E-78 >sp\|P24226\|HISX_BRAOC HISTIDINOL DEHYDROGENASE, |
| | | CHLOROPLAST PRECURSOR (HDH) >gi\|99844\|pir∥A39358 histidinol |
| | | dehydrogenase (EC 1.1.1.23) precursor, chloroplast - cabbage >gi\|167142 |
| | | (M60466) histidinol dehydrogenase [Brassica oleracea] Length = 469 |
| 140 | 2027140 | 2E-87 >sp\|P33077\|AX11_ARATH AUXIN-INDUCED PROTEIN AUX2-11 |
| | | >gi\|16197\|emb\|CAA37526\| (X53435) Aux2-11 protein [Arabidopsis thaliana] |
| | | >gi\|454285 (L15450) auxin-responsive protein [Arabidopsis thaliana] Length = 186 |
| 141 | 2027141 | Tyr_Phospho_Site(332-340) |
| 142 | 2027142 | 4E-33 >sp\|O22860\|RL38_ARATH 60S RIBOSOMAL PROTEIN L38 |
| | | >gi\|2289009 (AC002335) ribosomal protein L38 isolog [Arabidopsis thaliana] |
| | | Length = 69 |
| 143 | 2027143 | 5E-36 >dbj\|BAA17007\| (D90902) UDP-3-0-acyl N-acetylglcosamine |
| | | deacetylase [Synechocystis sp.] Length = 276 |
| 144 | 2027144 | 2E-20 >gb\|AAD23042.1\|AC006526_7 (AC006526) DNA binding protein |
| | | [Arabidopsis thaliana] Length = 295 |
| 145 | 2027145 | Tyr_Phospho_Site(868-876) |
| 146 | 2027146 | 3′ Pkc_Phospho_Site(98-100) |
| 147 | 2027147 | 3′ Pkc_Phospho_Site(19-21) |
| 148 | 2027148 | 3′ Tyr_Phospho_Site(440-446) |
| 149 | 2027149 | 3′ 7E-44 >gi\|5410298\|gb\|AAD43020.1\| (AF100756) coat protein gamma-cop |
| | | [Homo sapiens] Length = 874 |
| 150 | 2027150 | 3′ Receptor_Cytokines_1(784-797) |
| 151 | 2027151 | 5′ Pkc_Phospho_Site(22-24) |
| 152 | 2027152 | 5′ 2E-68 >gi\|2738027 (U87266) 2,3-oxidosqualene-triterpenoid cyclase |
| | | [Arabidopsis thaliana] Length = 757 |
| 153 | 2027153 | 5′ 4E-37 >gi\|1565225\|emb\|CAA64819\| (X95572) salt-tolerance protein |
| | | [Arabidopsis thaliana] Length = 248 |
| 154 | 2027154 | 5′ Tyr_Phospho_Site(490-497) |
| 155 | 2027155 | 5′ Tyr_Phospho_Site(706-713) |
| 156 | 2027156 | 5′ 1E-86 >gi\|2347188 (AC002338) laccase isolog [Arabidopsis |
| | | thaliana] >gi\|3150401 (AC004165) laccase [Arabidopsis thaliana] Length = 570 |
| 157 | 2027157 | 5′ Tyr_Phospho_Site(74-80) |
| 158 | 2027158 | 3E-20 >gb\|AAD39677.1\|AC007591_42 (AC007591) Contains PF\|00561 |
| | | alpha/beta hydrolase fold. [Arabidopsis thaliana] Length = 648 |
| 159 | 2027159 | 3E-41 >dbj\|BAA78560.1\| (AB024282) cysteine synthase [Arabidopsis |
| | | thaliana] >gi\|5824334\|emb\|CAB54830.1\| (AJ010505) cysteine synthase |
| | | [Arabidopsis thaliana] Length = 368 |
| 160 | 2027160 | 9E-50 >gb\|AAD26634.1\| (AF110407) ATP sulfurylase precursor |
| | | [Arabidopsis thaliana] >gi\|4803653\|emb\|CAB42640.1\| (AJ012586) sulfate |
| | | adenylyltransferase [Arabidopsis thaliana] Length = 469 |
| 161 | 2027161 | 3E-50 >emb\|CAA74401.1\| (Y14072) HMG protein [Arabidopsis thaliana] |
| | | Length = 144 |
| 162 | 2027162 | Tyr_Phospho_Site(621-628) |
| 163 | 2027163 | 1E-105 >sp\|Q07100\|P2A3_ARATH SERINE/THREONINE PROTEIN |
| | | PHOSPHATASE PP2A-3 CATALYTIC SUBUNIT >gi\|1076388\|pir∥S52659 |
| | | phosphoprotein phosphatase (EC 3.1.3.16) 2A isoform 3 - Arabidopsis thaliana |
| | | >gi\|466441 (M96841) Ser/Thr protein phosphatase [Arabidopsis thaliana] |
| | | >gi\|4559341\|gb\|AA |
| 164 | 2027164 | 1E-106 >gb\|AAD49991.1\|AC007259_4 (AC007259) Highly similar to Mlo proteins |
| | | [Arabidopsis thaliana] Length = 573 |
| 165 | 2027165 | Pts_Hpr_Ser(624-639) |
| 166 | 2027166 | Tyr_Phospho_Site(1093-1101) |
| 167 | 2027167 | 4E-18 >emb\|CAB16904\| (Z99759) rna binding protein |
| | | [Schizosaccharomyces pombe] Length = 166 |
| 168 | 2027168 | 1E-57 ) >gi\|1399265 (U31751) calmodulin-domain protein kinase CDPK |
| | | isoform 9 [Arabidopsis thaliana] Length = 541 |
| 169 | 2027169 | 3E-11 >gi\|1946374 (U93215) myb-like protein isolog [Arabidopsis |
| | | thaliana] >gi\|2347205 (AC002338) myb-like protein isolog [Arabidopsis thaliana] |
| | | Length = 128 |
| 170 | 2027170 | 3E-64 >sp\|P10798\|RBS4_ARATH RIBULOSE BISPHOSPHATE |
| | | CARBOXYLASE SMALL CHAIN 3B PRECURSOR (RUBISCO SMALL SUBUNIT |
| | | 3B) >gi\|68060\|pir∥RKMUB3 ribulose-bisphosphate carboxylase (EC 4.1.1.39) |
| | | small chain B3 precursor - Arabidopsis thaliana >gi\|16195\|emb\|CAA32702\| |
| | | (X14564) ribulose bisphosphate carboxylase [Arabidopsis thaliana] Length = 181 |
| 171 | 2027171 | 1E-59 >gi\|3608136 (AC005314) defender against cell death [Arabidopsis |
| | | thaliana] Length = 160 |
| 172 | 2027172 | 3′ 1E-31 >gi\|4006920\|emb\|CAB16815.1\| (Z99708) actin interacting protein |
| | | [Arabidopsis thaliana] Length = 524 |
| 173 | 2027173 | 3′ 9E-63 >gi\|1546700\|emb\|CAA67336\| (X98804) peroxidase ATP18a |
| | | [Arabidopsis thaliana] Length = 346 |
| 174 | 2027174 | 5′ 2E-38 >gi\|4490310\|emb\|CAB38801.1\| (AL035678) somatic embryogenesis |
| | | receptor-like kinase-like protein [Arabidopsis thaliana] Length = 523 |
| 175 | 2027175 | 5′ 8E-57 >gi\|2739376 (AC002505) permease [Arabidopsis thaliana] |
| | | Length = 551 |
| 176 | 2027176 | 5′ 2E-24 >gi\|5032147\|ref\|NP_005632.1\|pTAF2E\| TATA box binding protein |
| | | (TBP)-associated factor, RNA polymerase II, E, 70/85 kD |
| | | >gi\|1729810\|sp\|P49848\|T2D5_HUMAN TRANSCRIPTION INITIATION FACTOR |
| | | TFIID 70 KD SUBUNIT (TAFII-70) (TAFII-80) (TAFII80) >gi\|437385 (L25444) |
| | | TAFII70 [Homo sapiens] >gi\|11363 |
| 177 | 2027177 | 5′ Pkc_Phospho_Site(98-100) |
| 178 | 2027178 | 5′ 1E-65 >gi\|3121825\|sp\|O24364\|BAS1_SPIOL 2-CYS PEROXIREDOXIN |
| | | BAS1 PRECURSOR (THIOL-SPECIFIC ANTIOXIDANT PROTEIN) |
| | | >gi\|1498247\|emb\|CAA63910\| (X94219) bas1 protein [Spinacia oleracea] Length = |
| | | 265 |
| 179 | 2027179 | 5′ Prenylation(935-938) |
| 180 | 2027180 | 5′ Prenylation(935-938) |
| 181 | 2027181 | 5′ 1E-57 >gi\|2129578\|pir∥S58282 dTDP-glucose 4-6-dehydratases homolog - |
| | | Arabidopsis thaliana >gi\|928932\|emb\|CAA89205\| (Z49239) homolog of dTDP- |
| | | glucose 4-6-dehydratases [Arabidopsis thaliana] >gi\|1585435\|prf∥2124427B |
| | | diamide resistance gene [Arabidopsis thaliana] Length = 445 |
| 182 | 2027182 | Tyr_Phospho_Site(642-649) |
| 183 | 2027183 | 7E-21 >gi\|1871185 (U90439) seven in absentia isolog [Arabidopsis |
| | | thaliana] Length = 305 |
| 184 | 2027184 | 3E-43 >sp\|Q39411\|RL26_BRARA 60S RIBOSOMAL PROTEIN L26 |
| | | >gi\|2160300\|dbj\|BAA18941\| (D78495) ribosomal protein [Brassica rapa] Length = |
| | | 146 |
| 185 | 2027185 | Tyr_Phospho_Site(192-198) |
| 186 | 2027186 | 4E-73 >emb\|CAA05054\| (AJ001855) alpha subunit of F-actin capping |
| | | protein [Arabidopsis thaliana] Length = 308 |
| 187 | 2027187 | 1E-121 >gb\|AAD48837.1\|AF166351_1 (AF166351) alanine:glyoxylate |
| | | aminotransferase 2 homolog [Arabidopsis thaliana] Length = 476 |
| 188 | 2027188 | Tyr_Phospho_Site(173-180) |
| 189 | 2027189 | Tyr_Phospho_Site(955-962) |
| 190 | 2027190 | 3E-96 >gi\|2454184 (U80186) pyruvate dehydrogenase E1 beta subunit |
| | | [Arabidopsis thaliana] Length = 406 |
| 191 | 2027191 | 8E-84 >gb\|AAD55465.1\|AC009322_5 (AC009322) coatomer protein complex, |
| | | subunit beta 2 (beta prime) [Arabidopsis thaliana] Length = 920 |
| 192 | 2027192 | 1E-63 >emb\|CAA16562\| (AL021635) DNA binding protein [Arabidopsis |
| | | thaliana] Length = 334 |
| 193 | 2027193 | 1E-60 >sp\|P54967\|BIOB_ARATH BIOTIN SYNTHASE (BIOTIN |
| | | SYNTHETASE) >gi\|2129547\|pir∥S71201 biotin sythase - Arabidopsis thaliana |
| | | >gi\|1045316 (U24147) biotin sythase [Arabidopsis thaliana] >gi\|1403662 (U31806) |
| | | BIO2 protein [Arabidopsis thaliana] >gi\|1769457 (L34413) biotin synthase |
| | | [Arabidopsis thaliana] >gi\|2288983 (AC002335) biotin synthase (Bio B) |
| | | [Arabidopsis thaliana] >gi\|1589016\|prf∥2209438A biotin synthase [Arabidopsis |
| | | thaliana] Length = 378 |
| 194 | 2027194 | 2E-56 >pir∥S71176 RNA polymerase II third largest chain RPB35.5A - |
| | | Arabidopsis thaliana >gi\|514318 (L34770) RNA polymerase II third largest subunit |
| | | [Arabidopsis thaliana] >gi\|4544370\|gb\|AAD22281.1\|AC006920_5 (AC006920) |
| | | RNA polymerase II, third largest subunit [Arabidopsis thaliana] Length = 319 |
| 195 | 2027195 | 1E-103 >gi\|2832241 (AF030864) nonphototropic hypocotyl 1 |
| | | [Arabidopsis thaliana] Length = 996 |
| 196 | 2027196 | 1E-15 >emb\|CAB10805\| (Z97992) phosphatidylinositol 3-kinase |
| | | [Schizosaccharomyces pombe] Length = 2335 |
| 197 | 2027197 | Pkc_Phospho_Site(55-57) |
| 198 | 2027198 | Pkc_Phospho_Site(26-28) |
| 199 | 2027199 | 4E-30 >sp\|P38389\|S61B_ARATH PROTEIN TRANSPORT PROTEIN SEC61 |
| | | BETA SUBUNIT >gi\|433665\|emb\|CAA81412\| (Z26753) Sec61 beta-subunit |
| | | homolog [Arabidopsis thaliana] >gi\|4895244\|gb\|AAD32829.1\|AC007659_11 |
| | | (AC007659) transport protein SEC61 beta-subunit [Arabidopsis thaliana] Length = |
| | | 82 |
| 200 | 2027200 | 1E-156 >gi\|2529681 (AC002535) MYB-related transcription factor |
| | | (protein P) [Arabidopsis thaliana] Length = 371 |
| 201 | 2027201 | Tyr_Phospho_Site(164-172) |
| 202 | 2027202 | 3′ Tyr_Phospho_Site(491-498) |
| 203 | 2027203 | 3′ Tyr_Phospho_Site(634-641) |
| 204 | 2027204 | 5′ 1E-46 >gi\|4335751\|gb\|AAD17428\| (AC006284) methyltransferase |
| | | [Arabidopsis thaliana] Length = 619 |
| 205 | 2027205 | 5′ Tyr_Phospho_Site(97-103) |
| 206 | 2027206 | 5′ Pkc_Phospho_Site(198-200) |
| 207 | 2027207 | 5′ Tyr_Phospho_Site(30-37) |
| 208 | 2027208 | 5′ Pkc_Phospho_Site(35-37) |
| 209 | 2027209 | 5′ 1E-53 >gi\|5050913\|emb\|CAB44774.1\| (AJ131831) diacylglycerol O- |
| | | acyltransferase [Arabidopsis thaliana] >gi\|5123718\|emb\|CAB45373.1\| (AJ238008) |
| | | diacylglycerol acyltransferase [Arabidopsis thaliana] Length = 520 |
| 210 | 2027210 | 5′ Pkc_Phospho_Site(134-136) |
| 211 | 2027211 | 5′ Tyr_Phospho_Site(420-426) |
| 212 | 2027212 | 5′ 3E-69 >gi\|2288887\|emb\|CAA74700.1\| (Y14325) mevalonate diphosphate |
| | | decarboxylase [Arabidopsis thaliana] >gi\|3250736\|emb\|CAA76803.1\| (Y17593) |
| | | mevalonate diphosphate decarboxylase [Arabidopsis thaliana] >gi\|3786002 |
| | | (AC005499) mevalonate diphosphate decarboxylase [Arabidopsis thaliana] Length = |
| 213 | 2027213 | 5′ 3E-83 >gi\|1171978\|sp\|P42731\|PAB2_ARATH POLYADENYLATE-BINDING |
| | | PROTEIN 2 (POLY(A) BINDING PROTEIN 2) (PABP 2) >gi\|304109 (L19418) |
| | | poly(A)-binding protein [Arabidopsis thaliana] >gi\|2911051\|emb\|CAA17561\| |
| | | (AL021961) poly(A)-binding protein [Arabidopsis thaliana] Length = 629 |
| 214 | 2027214 | Pkc_Phospho_Site(23-25) |
| 215 | 2027215 | Tyr_Phospho_Site(131-138) |
| 216 | 2027216 | 1E-42 >gi\|3738302 (AC005309) tubby-like protein [Arabidopsis thaliana] |
| | | >gi\|4249398 (AC006072) tubby protein [Arabidopsis thaliana] Length = 407 |
| 217 | 2027217 | 4E-45 >gi\|2160185 (AC000132) Similar to S. pombe ISP4 (gb\|D83992). |
| | | [Arabidopsis thaliana] Length = 722 |
| 218 | 2027218 | 3E-68 ) >gb\|AAD29801.1\|AC006264_9 (AC006264) XAP-5 protein [Homo |
| | | sapiens] [Arabidopsis thaliana] Length = 383 |
| 219 | 2027219 | 1E-86 >gi\|2286153 (AF007581) cytoplasmic malate dehydrogenase [Zea |
| | | mays] Length = 332 |
| 220 | 2027220 | 1E-106 >gb\|AAD55591.1\|AC008016_1 (AC008016) Similar to gb\|AJ010025 unr- |
| | | interacting protein from Homo sapiens and contains 3 PF\|00400 WD40 domains. |
| | | EST gb\|T45021 comes from this gene. [Arabidopsis thaliana] Length = 343 |
| 221 | 2027221 | Pkc_Phospho_Site(31-33) |
| 222 | 2027222 | Tyr_Phospho_Site(23-29) |
| 223 | 2027223 | Tyr_Phospho_Site(384-392) |
| 224 | 2027224 | 1E-142 >pir∥S42883 alcohol dehydrogenase (EC 1.1.1.1) - Arabidopsis |
| | | thaliana Length = 344 |
| 225 | 2027225 | Tyr_Phospho_Site(344-352) |
| 226 | 2027226 | 3E-80 >gi\|2435511 (AF024504) contains similarity to prolyl 4-hydroxylase |
| | | alpha subunit [Arabidopsis thaliana] Length = 279 |
| 227 | 2027227 | Tyr_Phospho_Site(1377-1385) |
| 228 | 2027228 | 3E-76 >sp\|P21240\|RUBB_ARATH RUBISCO SUBUNIT BINDING-PROTEIN |
| | | BETA SUBUNIT PRECURSOR (60 KD CHAPERONIN BETA SUBUNIT) (CPN-60 |
| | | BETA) Length = 600 |
| 229 | 2027229 | 3′ Pkc_Phospho_Site(20-22) |
| 230 | 2027230 | 5′ Tyr_Phospho_Site(716-722) |
| 231 | 2027231 | 5′ 4E-84 >gi\|1702872\|emb\|CAA70862\| (Y09667) ferredoxin-dependent |
| | | glutamate synthase [Arabidopsis thaliana] Length = 1648 |
| 232 | 2027232 | 5′ 1E-79 >gi\|481131\|pir∥S38196 sucrose transport protein SUC2 - |
| | | Arabidopsis thaliana >gi\|407092\|emb\|CAA53150\| (X75382) sucrose-proton |
| | | symporter [Arabidopsis thaliana] Length = 512 |
| 233 | 2027233 | 5′ Pkc_Phospho_Site(90-92) |
| 234 | 2027234 | 5′ Pkc_Phospho_Site(75-77) |
| 235 | 2027235 | 5′ 3E-67 >gi\|1617270\|emb\|CAA64327\| (X94624) acyl-CoA synthetase |
| | | [Brassica napus] Length = 667 |
| 236 | 2027236 | 5′ Pkc_Phospho_Site(14-16) |
| 237 | 2027237 | 5′ Tyr_Phospho_Site(622-630) |
| 238 | 2027238 | 2E-22 >emb\|CAB10358.1\| (Z97339) OEP8 like protein [Arabidopsis |
| | | thaliana] Length = 487 |
| 239 | 2027239 | 1E-84 >emb\|CAA10173\| (AJ012796) ss-galactosidase [Lycopersicon |
| | | esculentum] Length = 838 |
| 240 | 2027240 | Pkc_Phospho_Site(2-4) |
| 241 | 2027241 | 2E-16 >dbj\|BAA05625\| (D26576) DNA-binding protein [Daucus carota] |
| | | Length = 308 |
| 242 | 2027242 | 7E-48 >sp\|P29344\|RR1_SPIOL 30S RIBOSOMAL PROTEIN S1, |
| | | CHLOROPLAST PRECURSOR (CS1) >gi\|282838\|pir∥S26494 ribosomal protein |
| | | S1, chloroplast - spinach >gi\|322404\|pir∥A44121 small subunit ribosomal protein |
| | | CS1, CS-S2 - spinach >gi\|18060\|emb\|CAA46927\| (X66135) ribosomal protein S1 |
| | | [Spinacia oleracea] >gi\|170143 (M82923) chloroplast ribosomal protein S1 |
| | | [Spinacia oleracea] Length = 411 |
| 243 | 2027243 | 1E-80 ) >emb\|CAA66958\| (X98314) peroxidase [Arabidopsis thaliana] |
| | | >gi\|4468977\|emb\|CAB38291\| (AL035605) peroxidase, prxr2 [Arabidopsis thaliana] |
| | | Length = 329 |
| 244 | 2027244 | Rgd(1737-1739) |
| 245 | 2027245 | 4E-55 >emb\|CAB36830.1\| (AL035528) isoflavone reductase-like protein |
| | | [Arabidopsis thaliana] Length = 317 |
| 246 | 2027246 | 2E-55 >gi\|2982942 (AE000679) GMP synthase [Aquifex aeolicus] Length = |
| | | 510 |
| 247 | 2027247 | 5E-55 >emb\|CAA66408\|(X97829) product similar to ccr protein, Citrus |
| | | paradisi; PIR: S52663 [Arabidopsis thaliana] >gi\|1550735\|emb\|CAA66824\| |
| | | (X98130) unknown [Arabidopsis thaliana] Length = 141 |
| 248 | 2027248 | 7E-84 >emb\|CAB10333.1\| (Z97339) glucosyltransferase like protein |
| | | [Arabidopsis thaliana] Length = 458 |
| 249 | 2027249 | 3′ Tyr_Phospho_Site(749-756) |
| 250 | 2027250 | 3′ Tyr_Phospho_Site(781-787) |
| 251 | 2027251 | 3′ Tyr_Phospho_Site(804-811) |
| 252 | 2027252 | 5′ Tyr_Phospho_Site(786-792) |
| 253 | 2027253 | 5′ 2E-84 >gi\|4544399\|gb\|AAD22309.1\|AC007047_18 (AC007047) beta- |
| | | ketoacyl-CoA synthase [Arabidopsis thaliana] Length = 512 |
| 254 | 2027254 | 5′ Tyr_Phospho_Site(270-277) |
| 255 | 2027255 | 5′ Pkc_Phospho_Site(109-111) |
| 256 | 2027256 | Pkc_Phospho_Site(2-4) |
| 257 | 2027257 | 1E-15 >sp\|Q03387\|IF41_WHEAT EUKARYOTIC INITIATION FACTOR |
| | | (ISO)4F SUBUNIT P82 (IEIF-(ISO)4F P82) >gi\|452440 (M95747) initiation factor |
| | | (iso)4f p82 subunit [Triticum aestivum] Length = 788 |
| 258 | 2027258 | 2E-98 >gi\|2323344 (AF014806) alpha-glucosidase 1 [Arabidopsis |
| | | thaliana] Length = 902 |
| 259 | 2027259 | Pkc_Phospho_Site(65-67) |
| 260 | 2027260 | 6E-18 >gb\|AAC78255.1\|AAC78255 (AC002330) bZIP-like DNA binding protein |
| | | [Arabidopsis thaliana] Length = 411 |
| 261 | 2027261 | 6E-91 >gi\|4191778 (AC005917) nucleosome assembly protein I |
| | | [Arabidopsis thaliana] Length = 379 |
| 262 | 2027262 | 2E-50 >emb\|CAA05547\| (AJ002551) heat shock protein 70 [Arabidopsis |
| | | thaliana] Length = 650 |
| 263 | 2027263 | 7E-23 >sp\|Q01525\|143O _ARATH 14-3-3-LIKE PROTEIN GF14 OMEGA |
| | | >gi\|487791 (U09376) GF14omega isoform [Arabidopsis thaliana] Length = 259 |
| 264 | 2027264 | Tyr_Phospho_Site(115-123) |
| 265 | 2027265 | Pkc_Phospho_Site(189-191) |
| 266 | 2027266 | 3E-55 >gi\|2801448 (AF028341) ubiquitin-conjugating enzyme 18 |
| | | [Arabidopsis thaliana] Length = 97 |
| 267 | 2027267 | Pkc_Phospho_Site(85-87) |
| 268 | 2027268 | 7E-59 ) >emb\|CAA67427\| (X98927) thylakoid-bound ascorbate peroxidase |
| | | [Arabidopsis thaliana] Length = 222 |
| 269 | 2027269 | 1E-29 >sp\|P41056\|R33B_YEAST 60S RIBOSOMAL PROTEIN L33-B (L37B) |
| | | (YL37) (RP47) >gi\|630323\|pir∥S44069 ribosomal protein L35a.e.c15 - yeast |
| | | (Saccharomyces cerevisiae) >gi\|484241 (L23923) ribosomal protein L37 |
| | | [Saccharomyces cerevisiae] >gi\|1420537\|emb\|CAA99454\|(Z75142) ORF |
| | | YOR234c [Saccharomyces cerevisiae] Length = 107 |
| 270 | 2027270 | 1E-37 >gb\|AAD20083\| (AC006836) nitrilase-associated protein |
| | | [Arabidopsis thaliana] Length = 119 |
| 271 | 2027271 | 1E-40 >gi\|2264368 (AC002354) tetracycline transporter-like protein |
| | | [Arabidopsis thaliana] Length = 128 |
| 272 | 2027272 | 3E-11 >gb\|AAD25608.1\|AC005287_10 (AC005287) ATPase [Arabidopsis |
| | | thaliana] Length = 1188 |
| 273 | 2027273 | Pkc_Phospho_Site(2-4) |
| 274 | 2027274 | 2E-21 >gi\|862473 (U12149) 5′-AMP-activated protein kinase catalytic |
| | | alpha-2 subunit [Rattus norvegicus] Length = 552 |
| 275 | 2027275 | 3E-41 >sp\|Q62651\|ECH1_RAT DELTA3,5-DELTA2,4-DIENOYL-COA |
| | | ISOMERASE PRECURSOR Length = 327 |
| 276 | 2027276 | 3′ 2E-50 >gi\|3695384 (AF096370) contains similarity to the helix-loop- |
| | | helix DNA-binding domain (Pfam: PF00010 HLH, E-value: 0.0046) [Arabidopsis |
| | | thaliana] Length = 298 |
| 277 | 2027277 | 5′ Tyr_Phospho_Site(102-108) |
| 278 | 2027278 | 5′ 6E-69 >gi\|5020168\|gb\|AAD38033.1\|AF149053_1 (AF149053) phytochrome |
| | | kinase substrate 1 [Arabidopsis thaliana] Length = 439 |
| 279 | 2027279 | 5′ Tyr_Phospho_Site(47-53) |
| 280 | 2027280 | 5′ 8E-13 >gi\|129053\|sp\|P11961\|ODP2_BACST DIHYDROLIPOAMIDE |
| | | ACETYLTRANSFERASE COMPONENT OF PYRUVATE DEHYDROGENASE |
| | | COMPLEX (E2) >gi\|98194\|pir∥S14426 dihydrolipoamide S-acetyltransferase (EC |
| | | 2.3.1.12) -Bacillus stearothermophilus >gi\|580909\|emb\|CAA37630\| (X53560) |
| | | dihydrolipoamide acetyltransfera |
| 281 | 2027281 | 5′ 6E-74 >gi\|1170182\|sp\|P43273\|HBPB_ARATH TRANSCRIPTION FACTOR |
| | | HBP-1B >gi\|479793\|pir∥S35439 transcription factor HBP-1b homolog - |
| | | Arabidopsis thaliana >gi\|217827\|dbj\|BAA00933\| (D10042) AHBP-1b [Arabidopsis |
| | | thaliana] Length = 330 |
| 282 | 2027282 | 5′ 2E-32 >gi\|1652586\|dbj\|BAA17507\| (D90906) cell division inhibitor |
| | | [Synechocystis sp.] Length = 339 |
| 283 | 2027283 | Tyr_Phospho_Site(95-103) |
| 284 | 2027284 | 2E-70 >sp\|P14671\|TRP1_ARATH TRYPTOPHAN SYNTHASE BETA CHAIN 1 |
| | | PRECURSOR >gi\|99767\|pir∥A31393 tryptophan synthase (EC 4.2.1.20) beta |
| | | chain - Arabidopsis thaliana >gi\|166892 (M23872) tryptophan synthase beta |
| | | subunit [Arabidopsis thaliana] Length = 470 |
| 285 | 2027285 | Tyr_Phospho_Site(609-617) |
| 286 | 2027286 | Pkc_Phospho_Site(79-81) |
| 287 | 2027287 | 7E-59 >gb\|AAD33716.1\|AF136539_1 (AF136539) YABBY2 [Arabidopsis thaliana] |
| | | Length = 184 |
| 288 | 2027288 | 4E-81 >emb\|CAA66821\| (X98130) alpha-mannosidase [Arabidopsis |
| | | thaliana] >gi\|1890154\|emb\|CAA72432\| (Y11767) alpha-mannosidase precursor |
| | | [Arabidopsis thaliana] Length = 1019 |
| 289 | 2027289 | Pkc_Phospho_Site(24-26) |
| 290 | 2027290 | 9E-64 >emb\|CAA72721.1\| (Y11996) PRT1 protein [Nicotiana tabacum] |
| | | Length = 719 |
| 291 | 2027291 | 5E-28 >gi\|2558938 (AF024625) arm repeat containing protein [Brassica |
| | | napus] Length = 661 |
| 292 | 2027292 | Rgd(219-221) |
| 293 | 2027293 | 6E-90 >sp\|P49299\|CYSZ_CUCMA CITRATE SYNTHASE, GLYOXYSOMAL |
| | | PRECURSOR (GCS) >gi\|1084323\|pir∥S53007 citrate synthase - cucurbit |
| | | >gi\|975633\|dbj\|BAA07328\| (D38132) glyoxysomal citrate synthase [Cucurbita sp.] |
| | | Length = 516 |
| 294 | 2027294 | 4E-76 >gb\|AAD15343\| (AC004044) similar to PHZF, catalyzing the |
| | | hydroxylation of phenazine-1-carboxylic acid to 2-hydroxy-phenazine-1-carboxylic |
| | | acid [Arabidopsis thaliana] Length = 294 |
| 295 | 2027295 | 2E-70 ) >gi\|3513727 (AF080118) contains similarity to TPR domains |
| | | (Pfam: TPR.hmm: score: 11.15) and kinesin motor domains (Pfam: kinesin2.hmm, |
| | | score: 17.49, 20.52 and 10.94) [Arabidopsis thaliana] >gi\|4539358\|emb\|CAB4 |
| 296 | 2027296 | 2E-30 >pir∥S59548 1-aminocyclopropane-1-carboxylate oxidase homolog |
| | | (clone 2A6) - Arabidopsis thaliana >gi\|599622\|emb\|CAA58151\| (X83096) 2A6 |
| | | [Arabidopsis thaliana] >gi\|2809261 (AC002560) F21B7.30 [Arabidopsis thalian |
| 297 | 2027297 | 8E-24 >emb\|CAB44316.1\| (AJ242659) serine palmitoyltransferase [Solanum |
| | | tuberosum] Length = 489 |
| 298 | 2027298 | Tyr_Phospho_Site(392-400) |
| 299 | 2027299 | Tyr_Phospho_Site(77-85) |
| 300 | 2027300 | Tyr_Phospho_Site(769-776) |
| 301 | 2027301 | 1E-55 >sp\|P93736\|SYV_ARATH VALYL-TRNA SYNTHETASE (VALINE- |
| | | TRNA LIGASE) (VALRS) >gi\|1890130\|gb\|AAB49704.1\| (U89986) valyl tRNA |
| | | synthetase [Arabidopsis thaliana] Length = 1107 |
| 302 | 2027302 | 3′ 2E-19 >gi\|5032159\|ref\|NP_005638.1\|pTBL1\|transducin (beta)-like 1 |
| | | >gi\|3021409\|emb\|CAA73319.1\| (Y12781) transducin (beta) like 1 protein [Homo |
| | | sapiens] Length = 577 |
| 303 | 2027303 | 3′ Pkc_Phospho_Site(19-21) |
| 304 | 2027304 | 3′ Tyr_Phospho_Site(866-872) |
| 305 | 2027305 | 3′ 3E-36 >gi\|4759264\|ref\|NP_004227.1\|pTRIP15\|thyroid receptor interacting |
| | | protein 15 >gi\|3514097 (AF084260) signalosome subunit 2 [Homo sapiens] |
| | | >gi\|3639069\|gb\|AAC36309.1\| (AF087688) alien-like protein [Mus musculus] |
| | | Length = 443 |
| 306 | 2027306 | 5′ Tyr_Phospho_Site(304-311) |
| 307 | 2027307 | 5′ Tyr_Phospho_Site(326-333) |
| 308 | 2027308 | 5′ Rgd(676-678) |
| 309 | 2027309 | 5′ Tyr_Phospho_Site(770-777) |
| 310 | 2027310 | 5′ Rgd(524-526) |
| 311 | 2027311 | 5′ Pkc_Phospho_Site(3-5) |
| 312 | 2027312 | 5′ Tyr_Phospho_Site(813-821) |
| 313 | 2027313 | 5′ Tyr_Phospho_Site(61-69) |
| 314 | 2027314 | 5′ Tyr_Phospho_Site(129-137) |
| 315 | 2027315 | 1E-92 >gi\|3738324 (AC005170) GMP synthase-like protein [Arabidopsis |
| | | thaliana] Length = 251 |
| 316 | 2027316 | Pkc_Phospho_Site(30-32) |
| 317 | 2027317 | 2E-11 >gi\|2809251 (AC002560) F21B7.20 [Arabidopsis thaliana] Length = |
| | | 447 |
| 318 | 2027318 | 3E-56 >emb\|CAB42597.1\| (AJ238633) ATP-dependent citrate lyase |
| | | [Chlorella protothecoides] Length = 242 |
| 319 | 2027319 | 9E-82 >emb\|CAA16574.1\| (AL021636) synaptobrevin-like protein |
| | | [Arabidopsis thaliana] >gi\|4103357 (AF025332) vesicle-associated membrane |
| | | protein 7C; synaptobrevin 7C [Arabidopsis thaliana] Length = 219 |
| 320 | 2027320 | 9E-28 >pir∥S28030 DNA-binding protein Gt-2 - rice |
| | | >gi\|20249\|emb\|CAA48328\| (X68261) gt-2 [Oryza sativa] Length = 737 |
| 321 | 2027321 | Tyr_Phospho_Site(201-207) |
| 322 | 2027322 | Pkc_Phospho_Site(22-24) |
| 323 | 2027323 | Tyr_Phospho_Site(97-105) |
| 324 | 2027324 | Pkc_Phospho_Site(143-145) |
| 325 | 2027325 | Pkc_Phospho_Site(228-230) |
| 326 | 2027326 | Pkc_Phospho_Site(5-7) |
| 327 | 2027327 | 9E-34 >gi\|4105798 (AF049930) PGP237-11 [Petunia x hybrida] Length = |
| | | 285 |
| 328 | 2027328 | 6E-53 >emb\|CAB52749.1\| (AJ245631) photosystem I subunit VI precursor |
| | | [Arabidopsis thaliana] Length = 145 |
| 329 | 2027329 | 8E-78 ) >emb\|CAA18628.1\| (AL022580) pectinacetylesterase protein |
| | | [Arabidopsis thaliana] Length = 362 |
| 330 | 2027330 | 5E-21 >gi\|2062164 (AC001645) jasmonate inducible protein isolog |
| | | [Arabidopsis thaliana] Length = 470 |
| 331 | 2027331 | 5′ 1E-40 >gi\|3242714 (AC003040) hypersensitivity-related protein |
| | | [Arabidopsis thaliana] Length = 451 |
| 332 | 2027332 | 5′ 7E-63 >gi\|3250693\|emb\|CAA19701.1\| (AL024486) lectin like protein |
| | | [Arabidopsis thaliana] Length = 246 |
| 333 | 2027333 | 5′ Tyr_Phospho_Site(760-767) |
| 334 | 2027334 | 5′ 1E-75 >gi\|2129662\|pir∥S71211 ovule-specific homeotic protein homolog |
| | | A20 - Arabidopsis thaliana >gi\|1881536 (U37589) A20 [Arabidopsis thaliana] |
| | | Length = 718 |
| 335 | 2027335 | 5′ 1E-16 >gi\|1174583\|sp\|P45055\|TALB_HAEIN TRANSALDOLASE |
| | | >gi\|1074653\|pir∥D64167 hypothetical protein HI1125- Haemophilus influenzae |
| | | (strain Rd KW20) >gi\|1574680 (U32792) transaldolase B (talB) [Haemophilus |
| | | influenzae Rd] Length = 317 |
| 336 | 2027336 | 5′ 3E-41 >gi\|6094274\|sp\|O23969\|SF21_HELAN POLLEN SPECIFIC PROTEIN |
| | | SF21 >gi\|2655926\|emb\|CAA70260\| (Y09057) sf21 [Helianthus annuus] Length = |
| | | 352 |
| 337 | 2027337 | 5′ 9E-54 >gi\|3287270\|emb\|CAA70725\| (Y09533) involved in starch metabalism |
| | | [Solanum tuberosum] Length = 1464 |
| 338 | 2027338 | 5′ Tyr_Phospho_Site(617-625) |
| 339 | 2027339 | 5′ 6E-72 >gi\|1705677\|sp\|P54609\|CC48_ARATH CELL DIVISION CYCLE |
| | | PROTEIN 48 HOMOLOG >gi\|2118115\|pir∥S60112 cell division control protein |
| | | CDC48 homolog - Arabidopsis thaliana >gi\|1019904 (U37587) cell division cycle |
| | | protein [Arabidopsis thaliana] Length = 809 |
| 340 | 2027340 | Pkc_Phospho_Site(116-118) |
| 341 | 2027341 | 2E-90 >gi\|166708 (M64118) glyceraldehyde-3-phosphate |
| | | dehydrogenase [Arabidopsis thaliana] Length = 447 |
| 342 | 2027342 | 1E-111 >emb\|CAA16619.1\| (AL021637) vacuolar sorting receptor-like |
| | | protein [Arabidopsis thaliana] Length = 626 |
| 343 | 2027343 | 1E-76 >sp\|Q38799\|ODPB_ARATH PYRUVATE DEHYDROGENASE E1 |
| | | COMPONENT BETA SUBUNIT, MITOCHONDRIAL PRECURSOR (PDHE1-B) |
| | | >gi\|520478 (U09137) pyruvate dehydrogenase E1 beta subunit [Arabidopsis |
| | | thaliana] >gi\|1090498\|prf∥2019230A pyruvate dehydrogenase [Arabidopsis |
| | | thaliana] Length = 363 |
| 344 | 2027344 | 1E-29 >gi\|2052383 (U66345) calreticulin [Arabidopsis thaliana] Length = |
| | | 424 |
| 345 | 2027345 | Pkc_Phospho_Site(25-27) |
| 346 | 2027346 | 2E-68 >gi\|2462781 (U73175) carbamoyl phosphate synthetase small |
| | | subunit [Arabidopsis thaliana] Length = 428 |
| 347 | 2027347 | Pkc_Phospho_Site(47-49) |
| 348 | 2027348 | Pkc_Phospho_Site(99-101) |
| 349 | 2027349 | Rgd(1172-1174) |
| 350 | 2027350 | 6E-29 >gi\|2347098 (U76845) ubiquitin-specific protease [Arabidopsis |
| | | thaliana] >gi\|4490742\|emb\|CAB38904.1\| (AL035708) ubiquitin-specific protease |
| | | (AtUBP3) [Arabidopsis thaliana] Length = 371 |
| 351 | 2027351 | 9E-30 >gb\|AAD55461.1\|AC009322_1 (AC009322) Heat-shock protein |
| | | [Arabidopsis thaliana] Length = 831 |
| 352 | 2027352 | 7E-54 >emb\|CAA17549\| (AL021961) cinnamyl alcohol dehydrogenase - |
| | | like protein [Arabidopsis thaliana] Length = 357 |
| 353 | 2027353 | 4E-95 ) >gi\|1946690 (U94495) glutathione peroxidase [Arabidopsis |
| | | thaliana] >gi\|4582452\|gb\|AAD24836.1\|AC007071_8 (AC007071) glutathione |
| | | peroxidase [Arabidopsis thaliana] Length = 169 |
| 354 | 2027354 | 1E-117 >sp\|P14712\|PHYA_ARATH PHYTOCHROME A >gi\|404670 (L21154) |
| | | phytochrome A [Arabidopsis thaliana] >gi\|3482934 (AC003970) phytochrome A |
| | | [Arabidopsis thaliana] Length = 1122 |
| 355 | 2027355 | 3′ 6E-83 >gi\|2827143 (AF027174) cellulose synthase catalytic subunit |
| | | [Arabidopsis thaliana] Length = 1065 |
| 356 | 2027356 | 5′ 1E-84 >gi\|5478791\|dbj\|BAA77716.2\| (AB027153) SNF1 related protein |
| | | kinase [Arabidopsis thaliana] Length = 429 |
| 357 | 2027357 | 5′ Pkc_Phospho_Site(38-40) |
| 358 | 2027358 | 5′ Pkc_Phospho_Site(14-16) |
| 359 | 2027359 | Pkc_Phospho_Site(6-8) |
| 360 | 2027360 | Pkc_Phospho_Site(46-48) |
| 361 | 2027361 | Pkc_Phospho_Site(81-83) |
| 362 | 2027362 | 3E-57 >gi\|2078350 (U95923) transaldolase [Solanum tuberosum] Length = |
| | | 438 |
| 363 | 2027363 | Pkc_Phospho_Site(66-68) |
| 364 | 2027364 | Tyr_Phospho_Site(800-807) |
| 365 | 2027365 | 1E-44 >sp\|P29402\|CALX_ARATH CALNEXIN HOMOLOG PRECURSOR |
| | | >gi\|421825\|pir∥JN0597 calnexin-like protein - Arabidopsis thaliana |
| | | >gi\|16211\|emb\|CAA79144\| (Z18242) calnexin homolog [Arabidopsis thaliana] |
| | | Length = 530 |
| 366 | 2027366 | Tyr_Phospho_Site(67-73) |
| 367 | 2027367 | 2E-67 ) >gi\|2454182 (U80185) pyruvate dehydrogenase E1 alpha |
| | | subunit [Arabidopsis thaliana] Length = 428 |
| 368 | 2027368 | 3E-39 >gb\|AAD25756.1\|AC007060_14 (AC007060) Contains the PF\|00650 |
| | | CRAL/TRIO phosphatidyl-inositol-transfer protein domain. ESTs gb\|T76582, |
| | | gb\|N06574 and gb\|Z25700 come from this gene. [Arabidopsis thaliana] Length = |
| | | 540 |
| 369 | 2027369 | 1E-123 >emb\|CAA72177\| (Y11336) RGA1 protein [Arabidopsis thaliana] |
| | | Length = 587 |
| 370 | 2027370 | 6E-59 >gb\|AAD22991.1\|AC007087_10 (AC007087) protein kinase MAP3K |
| | | [Arabidopsis thaliana] Length = 357 |
| 371 | 2027371 | Tyr_Phospho_Site(211-219) |
| 372 | 2027372 | Tyr_Phospho_Site(33-40) |
| 373 | 2027373 | 1E-130 >sp\|P41088\|CFI_ARATH CHALCONE-FLAVONONE ISOMERASE |
| | | (CHALCONE ISOMERASE) >gi\|320138\|pir∥JQ1687 chalcone isomerase (EC |
| | | 5.5.1.6) - Arabidopsis thaliana >gi\|166660\|gb\|AAA32766.1\| (M86358) chalcone |
| | | isomerase [Arabidopsis th |
| 374 | 2027374 | 1E-65 >gi\|1408471 (U48938) actin depolymerizing factor 1 [Arabidopsis |
| | | thaliana] >gi\|3851707 (AF102173) actin depolymerizing factor 1 [Arabidopsis |
| | | thaliana] Length = 139 |
| 375 | 2027375 | 3E-22 >emb\|CAB36734.1\| (AL035523) PROTEIN TRANSPORT PROTEIN |
| | | SEC61 GAMMA SUBUNIT-like [Arabidopsis thaliana] Length = 69 |
| 376 | 2027376 | 3′ Pkc_Phospho_Site(31-33) |
| 377 | 2027377 | 3′ Tyr_Phospho_Site(351-359) |
| 378 | 2027378 | 5′ 1E-17 >gi\|5640155\|emb\|CAB51557.1\| (AJ242530) gibberellin response |
| | | modulator [Zea mays] Length = 630 |
| 379 | 2027379 | 5′ 2E-12 >gi\|4006871\|emb\|CAB16789.1\| (Z99707) patatin-like protein |
| | | [Arabidopsis thaliana] Length = 428 |
| 380 | 2027380 | 5′ 1E-55 >gi\|1345933\|sp\|P49299\|CYSZ_CUCMA CITRATE SYNTHASE, |
| | | GLYOXYSOMAL PRECURSOR (GCS) >gi\|1084323\|pir∥S53007 citrate synthase - |
| | | cucurbit >gi\|975633\|dbj\|BAA07328\| (D38132) glyoxysomal citrate synthase |
| | | [Cucurbita sp.] Length = 516 |
| 381 | 2027381 | 5′ 5E-15 >gi\|5714366\|dbj\|BAA83106.1\| (AB030450) ABC transporter |
| | | [Drosophila melanogaster] Length = 832 |
| 382 | 2027382 | 5′ 1E-48 >gi\|1076385\|pir∥A49318 protein kinase (EC 2.7.1.37) tousled - |
| | | Arabidopsis thaliana >gi\|433052 (L23985) protein kinase [Arabidopsis thaliana] |
| | | Length = 688 |
| 383 | 2027383 | 5′ Tyr_Phospho_Site(146-154) |
| 384 | 2027384 | 3E-17 >gi\|3047106 (AF058919) Arabidopsis thaliana homeodomain |
| | | protein AHDP (SP:P93041) [Arabidopsis thaliana] Length = 590 |
| 385 | 2027385 | 9E-56 ) >gb\|AAD32833.1\|AC007659_15 (AC007659) mitochondrial elongation |
| | | factor G [Arabidopsis thaliana] Length = 754 |
| 386 | 2027386 | Pkc_Phospho_Site(15-17) |
| 387 | 2027387 | 1E-84 >sp\|Q96250\|ATP3_ARATH ATP SYNTHASE GAMMA CHAIN, |
| | | MITOCHONDRIAL PRECURSOR >gi\|1655480\|dbj\|BAA13599\| (D88374) gamma |
| | | subunit of mitochondrial F1-ATPase [Arabidopsis thaliana] >gi\|2924787 |
| | | (AC002334) mitochondrial F1-ATPase, gamma subunit [Arabidopsis thaliana] |
| | | Length = 325 |
| 388 | 2027388 | 3E-76 >gb\|AAC62624.1\| (AF064787) rac GTPase activating protein 1 |
| | | [Lotus japonicus] Length = 493 |
| 389 | 2027389 | Tyr_Phospho_Site(233-241) |
| 390 | 2027390 | 1E-14 >pir∥JN0673 ubiquitin-like fusion protein An1a - African clawed frog |
| | | Length = 693 |
| 391 | 2027391 | 2E-94 >gi\|3738301 (AC005309) zinc-finger protein [Arabidopsis thaliana] |
| | | >gi\|4249397 (AC006072) zinc-finger protein (B-box zinc finger domain) |
| | | [Arabidopsis thaliana] Length = 332 |
| 392 | 2027392 | 1E-109 >emb\|CAB16852.1\| (Z99708) beta-galactosidase like protein |
| | | [Arabidopsis thaliana] Length = 853 |
| 393 | 2027393 | Tyr_Phospho_Site(523-530) |
| 394 | 2027394 | Pkc_Phospho_Site(10-12) |
| 395 | 2027395 | 2E-45 >sp\|Q39023\|MPK3_ARATH MITOGEN-ACTIVATED PROTEIN KINASE |
| | | HOMOLOG 3 (MAP KINASE 3) (ATMPK3) >gi\|629544\|pir∥S40469 mitogen- |
| | | activated protein kinase 3 (EC 2.7.1.-) - Arabidopsis thaliana |
| | | >gi\|457398\|dbj\|BAA04866\| (D21839) MAP |
| 396 | 2027396 | Pkc_Phospho_Site(9-11) |
| 397 | 2027397 | Pkc_Phospho_Site(6-8) |
| 398 | 2027398 | 3E-19 >emb\|CAA20571.1\| (AL031394) carbonate dehydratase-like protein |
| | | [Arabidopsis thaliana] Length = 173 |
| 399 | 2027399 | Pkc_Phospho_Site(35-37) |
| 400 | 2027400 | 3′ Tyr_Phospho_Site(332-340) |
| 401 | 2027401 | 3′ Pkc_Phospho_Site(84-86) |
| 402 | 2027402 | 5′ Tyr_Phospho_Site(730-737) |
| 403 | 2027403 | 5′ 3E-32 >gi\|6322411\|ref\|NP_012485.1\|MTR4\|RNA helicase; Mtr4p |
| | | >gi\|1352980\|sp\|P47047\|MTR4_YEAST ATP-DEPENDENT RNA HELICASE |
| | | DOB1 (MRNA TRANSPORT REGULATOR MTR4) >gi\|1078374\|pir∥S56822 SKI2 |
| | | protein homolog YJL050w - yeast (Saccharomyces cerevisiae) |
| | | >gi\|1008185\|emb\|CAA89341\| (Z49325) ORF YJL050w |
| 404 | 2027404 | 5′ 4E-29 >gi\|6323033\|ref\|NP_013105.1\|SSL1\|Component of RNA polymerase |
| | | transcription factor TFIIH; SsI1p >gi\|417813\|sp\|Q04673\|SSL1_YEAST |
| | | SUPRESSOR OF STEM-LOOP PROTEIN 1 >gi\|543690\|pir∥A46394 suppressor |
| | | protein SSL1 - yeast (Saccharomyces cerevisiae) >gi\|2696\|emb\|CAA78992\| |
| | | (Z17385) supressor |
| 405 | 2027405 | 4E-83 >gi\|2149640 (U91995) Argonaute protein [Arabidopsis thaliana] |
| | | >gi\|5733867\|gb\|AAD49755.1\|AC007932_3 (AC007932) Identical to gb\|U91995 |
| | | Argonaute protein from Arabidopsis thaliana. ESTs gb\|H76075, gb\|AA720232, |
| | | gb\|N65911 and gb\|AA651494 come from this gene. Length = 1048 |
| 406 | 2027406 | Tyr_Phospho_Site(946-953) |
| 407 | 2027407 | 5E-51 >gi\|2352812 (AF008597) desacetoxyvindoline-4-hydroxylase |
| | | [Catharanthus roseus] Length = 401 |
| 408 | 2027408 | Pkc_Phospho_Site(16-18) |
| 409 | 2027409 | 1E-15 >dbj\|BAA12906.2\| (D85881) YGHL2 [Seriola quinqueradiata] Length = |
| | | 392 |
| 410 | 2027410 | 4E-29 >sp\|P73443\|SYK_SYNY3 LYSYL-TRNA SYNTHETASE (LYSINE- |
| | | TRNA LIGASE) (LYSRS) >gi\|1652562\|dbj\|BAA17483\| (D90906) lysyl-tRNA |
| | | synthetase [Synechocystis sp.] Length = 510 |
| 411 | 2027411 | 6E-82 >gi\|3644034 (AF091304) aminoacyl peptidase [Glycine max] |
| | | Length = 202 |
| 412 | 2027412 | Tyr_Phospho_Site(1755-1761) |
| 413 | 2027413 | 1E-93 >sp\|P42742\|PRC5_ARATH PROTEASOME COMPONENT C5 |
| | | (MULTICATALYTIC ENDOPEPTIDASE COMPLEX SUBUNIT C5) (TAS- |
| | | F22\|FAFP98) >gi\|600387\|emb\|CAA47753\| (X67338) proteosome subunit |
| | | [Arabidopsis thaliana] Length = 230 |
| 414 | 2027414 | 5E-37 >gb\|AAD25835.1\|AC006951_14 (AC006951) antisense basic fibroblast |
| | | growth factor [Arabidopsis thaliana] Length = 283 |
| 415 | 2027415 | 2E-35 >gb\|AAD25553.1\|AC005850_10 (AC005850) serine/threonine kinase |
| | | [Arabidopsis thaliana] Length = 802 |
| 416 | 2027416 | Pkc_Phospho_Site(43-45) |
| 417 | 2027417 | Tyr_Phospho_Site(459-466) |
| 418 | 2027418 | 1E-23 >emb\|CAA76145\| (Y16262) neutral invertase [Daucus carota] |
| | | Length = 675 |
| 419 | 2027419 | Pkc_Phospho_Site(43-45) |
| 420 | 2027420 | 4E-45 >sp\|P49364\|GCST_PEA AMINOMETHYLTRANSFERASE |
| | | PRECURSOR (GLYCINE CLEAVAGE SYSTEM T PROTEIN) |
| | | >gi\|541970\|pir∥S40260 T-protein - garden pea >gi\|1362061\|pir∥S56661 glycine |
| | | decarboxylase T protein precursor - garden pea >gi\|438217\|emb\|CAA81080\| |
| | | (Z25861) T-protein [Pisum sativum] >gi\|3021553\|emb\|CAA10976\| (AJ222771) T |
| | | protein [Pisum sativum] Length = 408 |
| 421 | 2027421 | 5′ 2E-30 >gi\|2146745\|pir∥S71169 protein kinase (EC 2.7.1.-) - Arabidopsis |
| | | thaliana >gi\|642132\|dbj\|BAA08215\| (D45354) protein kinase [Arabidopsis thaliana] |
| | | Length = 467 |
| 422 | 2027422 | 5′ 3E-57 >gi\|3550519\|emb\|CAA07589\| (AJ007630) oxygenase [Nicotiana |
| | | tabacum] Length = 643 |
| 423 | 2027423 | 5′ 2E-28 >gi\|1171642\|sp\|P43293\|NAK_ARATH PROBABLE |
| | | SERINE/THREONINE-PROTEIN KINASE NAK >gi\|481206\|pir∥S38326 protein |
| | | kinase - Arabidopsis thaliana >gi\|166809 (L07248) protein kinase [Arabidopsis |
| | | thaliana] Length = 389 |
| 424 | 2027424 | 5′ Tyr_Phospho_Site(617-624) |
| 425 | 2027425 | Pkc_Phospho_Site(89-91) |
| 426 | 2027426 | Tyr_Phospho_Site(169-176) |
| 427 | 2027427 | 5E-20 >ref\|NP_002486.1\|PNDUFS4\|NADH dehydrogenase (ubiquinone) Fe—S |
| | | protein 4 (18 kD) (NADH-coenzyme Q reductase) |
| | | >gi\|3287881\|sp\|O43181\|NUYM_HUMAN NADH-UBIQUINONE |
| | | OXIDOREDUCTASE 18 KD SUBUNIT PRECURSOR (COMPLEX I-18 KD) (CI-18 |
| | | KD) (COMPLEX I-AQDQ) (CI-AQDQ) >gi\|2655053 (AF020351) NA |
| 428 | 2027428 | 5E-24 >emb\|CAB36734.1\| (AL035523) PROTEIN TRANSPORT PROTEIN |
| | | SEC61 GAMMA SUBUNIT-like [Arabidopsis thaliana] Length = 69 |
| 429 | 2027429 | 3E-34 >emb\|CAB10426.1\| (Z97341) cysteine proteinase inhibitor like protein |
| | | [Arabidopsis thaliana] Length = 117 |
| 430 | 2027430 | Pkc_Phospho_Site(5-7) |
| 431 | 2027431 | 5E-79 >gi\|3193306 (AF069300) contains similarity to Arabidopsis |
| | | membrane-associated salt-inducible-like protein (GB:AL021637) [Arabidopsis |
| | | thaliana] Length = 991 |
| 432 | 2027432 | Tyr_Phospho_Site(35-43) |
| 433 | 2027433 | Tyr_Phospho_Site(439-446) |
| 434 | 2027434 | 5E-99 >gi\|3941289 (AF018093) similarity to SCAMP37 [Pisum sativum] |
| | | Length = 289 |
| 435 | 2027435 | Tyr_Phospho_Site(602-608) |
| 436 | 2027436 | 2E-49 >sp\|P27521\|CB24_ARATH CHLOROPHYLL A-B BINDING PROTEIN 4 |
| | | PRECURSOR (LHCI TYPE III CAB-4) (LHCP) >gi\|166646 (M63931) light- |
| | | harvesting chlorophyll a/b binding protein [Arabidopsis thaliana] Length = 251 |
| 437 | 2027437 | Tyr_Phospho_Site(295-302) |
| 438 | 2027438 | Pkc_Phospho_Site(15-17) |
| 439 | 2027439 | 3′ 6E-45 >gi\|2435395 (U63550) pectate lyase [Fragaria x ananassa] |
| | | Length = 405 |
| 440 | 2027440 | 5′ 6E-43 >gi\|3319341\|gb\|AAC26230.1\| (AF077407) similar to Medicago sativa |
| | | nucleic acid binding protein Alfin-1 (GB:L07291) [Arabidopsis thaliana] Length = |
| | | 251 |
| 441 | 2027441 | 5′ Tyr_Phospho_Site(333-339) |
| 442 | 2027442 | 5′ Pkc_Phospho_Site(9-11) |
| 443 | 2027443 | 5′ Tyr_Phospho_Site(22-29) |
| 444 | 2027444 | 5′ Pkc_Phospho_Site(34-36) |
| 445 | 2027445 | 5′ 5E-39 >gi\|4538987\|emb\|CAB39730.1\| (AJ133777) gamma-adaptin 2 |
| | | [Arabidopsis thaliana] Length = 876 |
| 446 | 2027446 | 5′ 2E-84 >gi\|4887761\|gb\|AAD32297.1\|AC006533_21 (AC006533) indole-3- |
| | | acetate beta-glucosyltransferase [Arabidopsis thaliana] Length = 456 |
| 447 | 2027447 | 5′ Tyr_Phospho_Site(77-83) |
| 448 | 2027448 | Tyr_Phospho_Site(105-111) |
| 449 | 2027449 | Pkc_Phospho_Site(278-280) |
| 450 | 2027450 | 1E-29 >sp\|P46269\|UCRQ_SOLTU UBIQUINOL-CYTOCHROME C |
| | | REDUCTASE COMPLEX UBIQUINONE-BINDING PROTEIN QP-C (UBIQUINOL- |
| | | CYTOCHROME C REDUCTASE COMPLEX 8.2 KD PROTEIN) |
| | | >gi\|633687\|emb\|CAA55862\| (X79275) ubiquinol-cytochrome c reductase |
| | | [Solanum tuberosum] >gi\|1094912\|prf∥2107179A cytoch |
| 451 | 2027451 | 5E-71 >gi\|4115379 (AC005967) carbonyl reductase [Arabidopsis |
| | | thaliana] Length = 296 |
| 452 | 2027452 | 2E-26 >emb\|CAB52267.1\| (AL109739) trp-asp repeat protein |
| | | [Schizosaccharomyces pombe] Length = 507 |
| 453 | 2027453 | 6E-35 >gi\|2352492 (AF005047) transport inhibitor response 1 |
| | | [Arabidopsis thaliana] >gi\|2352494 (AF005048) transport inhibitor response 1 |
| | | [Arabidopsis thaliana] Length = 594 |
| 454 | 2027454 | 3E-31 >sp\|Q40545\|KPYA_TOBAC PYRUVATE KINASE ISOZYME A, |
| | | CHLOROPLAST PRECURSOR >gi\|482936\|emb\|CAA82222\| (Z28373) pyruvate |
| | | kinase; plastid isozyme [Nicotiana tabacum] Length = 593 |
| 455 | 2027455 | 2E-40 >gi\|2088646 (AF002109) Su1p isolog [Arabidopsis thaliana] |
| | | Length = 783 |
| 456 | 2027456 | Pkc_Phospho_Site(28-30) |
| 457 | 2027457 | Tyr_Phospho Site(703-711) |
| 458 | 2027458 | Tyr_Phospho_Site(629-635) |
| 459 | 2027459 | 3′ Tyr_Phospho_Site(32-38) |
| 460 | 2027460 | 3′ Tyr_Phospho_Site(180-186) |
| 461 | 2027461 | 5′ Tyr_Phospho_Site(862-870) |
| 462 | 2027462 | 5′ Tyr_Phospho_Site(651-658) |
| 463 | 2027463 | 5′ 2E-69 >gi\|1762584 (U63373) polygalacturonase isoenzyme 1 beta |
| | | subunit homolog [Arabidopsis thaliana] Length = 626 |
| 464 | 2027464 | 5′ Pkc_Phospho_Site(273-275) |
| 465 | 2027465 | 5′ Pkc_Phospho_Site(20-22) |
| 466 | 2027466 | 5E-22 >gb\|AAD32802.1\|AC007660_3 (AC007660) serine/threonine protein |
| | | kinase [Arabidopsis thaliana] Length = 1648 |
| 467 | 2027467 | 2E-16 >gb\|AAD56636.1\|AF162150_1 (AF162150) COP1-interacting protein CIP8 |
| | | [Arabidopsis thaliana] Length = 334 |
| 468 | 2027468 | Pkc_Phospho_Site(28-30) |
| 469 | 2027469 | 3E-13 >gi\|2494120 (AC002376) Similar to Synechocystis integral |
| | | membrane protein (gb\|D64002). [Arabidopsis thaliana] Length = 431 |
| 470 | 2027470 | 1E-111 >gi\|3413705 (AC004747) glycine dehydrogenase [Arabidopsis |
| | | thaliana] Length = 1044 |
| 471 | 2027471 | Pkc_Phospho_Site(47-49) |
| 472 | 2027472 | Tyr_Phospho_Site(220-227) |
| 473 | 2027473 | 2E-78 >pir∥S45094 cinnamyl-alcohol dehydrogenase (EC 1.1.1.195) - |
| | | Arabidopsis thaliana Length = 362 |
| 474 | 2027474 | 5E-26 >gi\|1388021 (U20345) UDP-glucose pyrophosphorylase [Solanum |
| | | tuberosum] Length = 477 |
| 475 | 2027475 | 5E-67 >gi\|2459420 (AC002332) ribosomal protein L17 [Arabidopsis |
| | | thaliana] Length = 140 |
| 476 | 2027476 | Tyr_Phospho_Site(149-157) |
| 477 | 2027477 | Tyr_Phospho_Site(859-866) |
| 478 | 2027478 | Pkc_Phospho_Site(33-35) |
| 479 | 2027479 | 1E-78 ) >dbj\|BAA84384.1\| (AP000423) PSI P700 apoprotein A2 |
| | | [Arabidopsis thaliana] Length = 734 |
| 480 | 2027480 | 9E-74 >dbj\|BAA33447\| (AB006778) vegetative storage protein |
| | | [Arabidopsis thaliana] Length = 265 |
| 481 | 2027481 | Pkc_Phospho_Site(70-72) |
| 482 | 2027482 | Tyr_Phospho Site(311-318) |
| 483 | 2027483 | 3E-91 >sp\|P07639\|AROB_ECOLI 3-DEHYDROQUINATE SYNTHASE |
| | | >gi\|68385\|pir∥SYECQ 3-dehydroquinate synthase (EC 4.6.1.3) - Escherichia coli |
| | | >gi\|40968\|emb\|CAA27495\| (X03867) 3-dehydroquinate synthase (aa 1-362) |
| | | [Escherichia coli] >gi\|41225\|emb\|CAA79666\| (Z19601) ORF, aroB. Millar G., |
| | | Coggins J. R.; FEBS Lett. 200:11-17(1986) [Escherichia coli] |
| | | >gi\|606323\|gb\|AAA58186.1\| (U18997) 3-dehydroquinate synthase [Escherichia |
| | | coli] >gi\|1789791 (AE000414) 3-dehydroquinate synthase [Escherichia coli] Length = |
| | | 362 |
| 484 | 2027484 | 1E-118 >gi\|2739382 (AC002505) myosin heavy chain-like protein |
| | | [Arabidopsis thaliana] Length = 807 |
| 485 | 2027485 | 4E-84 >prf∥1804333D Gln synthetase [Arabidopsis thaliana] Length = 430 |
| 486 | 2027486 | 3′ Pkc_Phospho_Site(74-76) |
| 487 | 2027487 | 3′ Tyr_Phospho_Site(227-234) |
| 488 | 2027488 | 3′ Pkc_Phospho_Site(97-99) |
| 489 | 2027489 | 3′ Pkc_Phospho_Site(17-19) |
| 490 | 2027490 | 3′ Pkc_Phospho_Site(4-6) |
| 491 | 2027491 | 5′ Pkc_Phospho_Site(4-6) |
| 492 | 2027492 | 5′ 1E-11 >gi\|3860165 (AF098963) disease resistance protein RPP1- |
| | | WsB [Arabidopsis thaliana] Length = 1221 |
| 493 | 2027493 | 5′ 3E-36 >gi\|1399273 (U31834) calmodulin-domain protein kinase |
| | | CDPK isoform 5 [Arabidopsis thaliana] >gi\|3080419\|emb\|CAA18738.1\| |
| | | (AL022604) calmodulin-domain protein kinase CDPK isoform 5 (CPK5) |
| | | [Arabidopsis thaliana] Length = 556 |
| 494 | 2027494 | 5′ 5E-12 >gi\|2127192\|pir∥I40463 ribokinase (EC 2.7.1.15) - Bacillus subtilis |
| | | >gi\|397495\|emb\|CAA81049\| (Z25798) Ribokinase [Bacillus subtilis] Length = 286 |
| 495 | 2027495 | 5′ Rgd(264-266) |
| 496 | 2027496 | 5′ 2E-25 >gi\|4512651\|gb\|AAD21706.1\| (AC007048) tyrosine transaminase |
| | | [Arabidopsis thaliana] Length = 462 |
| 497 | 2027497 | 5′ 2E-57 >gi\|3582000\|emb\|CAA09419.1\| (AJ010942) hexose transporter |
| | | protein [Lycopersicon esculentum] Length = 523 |
| 498 | 2027498 | Pkc_Phospho_Site(13-15) |
| 499 | 2027499 | 1E-45 >ref\|NP_006416.1\|PSLU7\| step II splicing factor SLU7 |
| | | >gi\|4249705\|gb\|AAD13774.1\| (AF101074) step II splicing factor SLU7 [Homo |
| | | sapiens] Length = 586 |
| 500 | 2027500 | Tyr_Phospho_Site(280-287) |
| 501 | 2027501 | Tyr_Phospho_Site(1056-1062) |
| 502 | 2027502 | 5E-24 >gi\|3668082 (AC004667) DAL1 protein [Arabidopsis thaliana] |
| | | Length = 232 |
| 503 | 2027503 | 2E-88 >emb\|CAB16828.1\| (Z99708) splicing factor-like protein [Arabidopsis |
| | | thaliana] Length = 573 |
| 504 | 2027504 | 4E-64 >dbj\|BAA19529\| (AB002560) CUC2 [Arabidopsis thaliana] Length = |
| | | 375 |
| 505 | 2027505 | 4E-66 >sp\|Q06548\|APKA_ARATH PROTEIN KINASE APK1A |
| | | >gi\|282877\|pir∥S28615 protein kinase, tyrosine/serine/threonine-specific (EC |
| | | 2.7.1.-) - Arabidopsis thaliana >gi\|217829\|dbj\|BAA02092\| (D12522) protein |
| | | tyrosine-serine-threonine kinase [Arabidopsis thaliana] Length = 410 |
| 506 | 2027506 | 5E-27 >gb\|AAD25805.1\|AC006550_13 (AC006550) Contains PF\|00010 helix- |
| | | loop-helix DNA-binding domain. ESTs gb\|T45640 and gb\|T22783 come from this |
| | | gene. [Arabidopsis thaliana] Length = 297 |
| 507 | 2027507 | 1E-72 >emb\|CAA10363.1\| (AJ131391) voltage-dependent anion-selective |
| | | channel protein [Arabidopsis thaliana] Length = 274 |
| 508 | 2027508 | Tyr_Phospho_Site(733-741) |
| 509 | 2027509 | 6E-81) >gi\|2832241 (AF030864) nonphototropic hypocotyl 1 |
| | | [Arabidopsis thaliana] Length = 996 |
| 510 | 2027510 | 6E-82 >gb\|AAD26977.1\|AC007265_2 (AC007265) unknown protein [Arabidopsis |
| | | thaliana] Length = 283 |
| 511 | 2027511 | 3′ 1E-18 >gi\|2252840 (AF013293) contains regions of similarity to |
| | | Haemophilus influenzae permease (SP:P38767) [Arabidopsis thaliana] |
| | | >gi\|6049882\|gb\|AAF02797.1\|AF195115_17 (AF195115) contains regions of |
| | | similarity to Haemophilus influenzae permease (SP:P38767) [Arabidopsis thaliana] |
| | | Length = 746 |
| 512 | 2027512 | 3′ Tyr_Phospho_Site(740-746) |
| 513 | 2027513 | 3′ Tyr_Phospho_Site(837-844) |
| 514 | 2027514 | 5′ 1E-52 >gi\|5302805\|emb\|CAB46046.1\| (Z97342) disease resistance RPP5 |
| | | like protein [Arabidopsis thaliana] Length = 1304 |
| 515 | 2027515 | 5′ 3E-54 >gi\|2245037\|emb\|CAB10456.1\| (Z97342) nuclear antigen homolog |
| | | [Arabidopsis thaliana] Length = 355 |
| 516 | 2027516 | 5′ 1E-81 >gi\|4455342\|emb\|CAB36723\| (AL035522) O-methyltransferase-like |
| | | protein [Arabidopsis thaliana] Length = 382 |
| 517 | 2027517 | 5′ 1E-89 >gi\|1363489\|pir∥S57621 thioglucosidase (EC 3.2.3.1) 3D precursor - |
| | | Arabidopsis thaliana >gi\|984052\|emb\|CAA61592\| (X89413) thioglucoside |
| | | glucohydrolase [Arabidopsis thaliana] >gi\|5524767\|emb\|CAB50792.1\| (AJ243490) |
| | | thioglucoside glucohydrolase [Arabidopsis thaliana] Length = 524 |
| 518 | 2027518 | 5′ Pkc_Phospho_Site(68-70) |
| 519 | 2027519 | 5′ Tyr_Phospho_Site(689-695) |
| 520 | 2027520 | 5′ Wd_Repeats(856-870) |
| 521 | 2027521 | 5′ Tyr_Phospho_Site(332-339) |
| 522 | 2027522 | 3E-50 >gi\|2191159 (AF007270) Similar to serine |
| | | hydroxymethyltransferase; coded for by A. thaliana cDNA T42313; coded for by A. |
| | | thaliana cDNA W43384 [Arabidopsis thaliana] Length = 532 |
| 523 | 2027523 | 2E-40 >sp\|O22048\|AX1C_ARATH ALTERNATIVE OXIDASE 1C |
| | | PRECURSOR >gi\|2506049\|dbj\|BAA22635\| (AB003175) alternative oxidase |
| | | [Arabidopsis thaliana] Length = 329 |
| 524 | 2027524 | Tyr_Phospho_Site(277-285) |
| 525 | 2027525 | Tyr_Phospho_Site(634-641) |
| 526 | 2027526 | Pkc_Phospho_Site(12-14) |
| 527 | 2027527 | Tyr_Phospho_Site(461-469) |
| 528 | 2027528 | 1E-75 >dbj\|BAA37167\| (AB008097) cytochrome P450 [Arabidopsis |
| | | thaliana] Length = 524 |
| 529 | 2027529 | 2E-85 >dbj\|BAA36337\| (AB015143) AHP3 [Arabidopsis thaliana] Length = |
| | | 155 |
| 530 | 2027530 | 1E-16 >pir∥S30515 wound-induced protein -western balsam poplar |
| | | >gi\|20956\|emb\|CAA39082\| (X55440) unnamed protein product [Populus |
| | | balsamifera subsp. trichocarpa] >gi\|20965\|emb\|CAA40072\| (X56752) unnamed |
| | | protein produ |
| 531 | 2027531 | 1E-50 >sp\|P49967\|SR53_ARATH SIGNAL RECOGNITION PARTICLE 54 KD |
| | | PROTEIN 3 (SRP54) >gi\|515681 (U12127) signal recognition particle 54 kDa |
| | | subunit [Arabidopsis thaliana] Length = 495 |
| 532 | 2027532 | 1E-27 >gb\|AAC50037.1\| (U97200) cobalamin-independent methionine |
| | | synthase [Arabidopsis thaliana] Length = 765 |
| 533 | 2027533 | 7E-34 >sp\|P48496\|TPIC_SPIOL TRIOSEPHOSPHATE ISOMERASE, |
| | | CHLOROPLAST PRECURSOR (TIM) >gi\|1084309\|pir∥S52032 triose-phosphate |
| | | isomerase (EC 5.3.1.1) precursor, chloroplast - spinach >gi\|806312 (L36387) |
| | | triosephosphate isomerase, chloroplast isozyme [Spinacia oleracea] Length = 322 |
| 534 | 2027534 | 3′ 4E-18 >gi\|4836892\|gb\|AAD30595.1\|AC007369_5 (AC007369) RNA helicase |
| | | [Arabidopsis thaliana] Length = 2171 |
| 535 | 2027535 | 3′ Pkc_Phospho_Site(2-4) |
| 536 | 2027536 | 3′ Pkc_Phospho_Site(2-4) |
| 537 | 2027537 | 3′ 1E-20 >gi\|4827050\|ref\|NP_005142.1\|pUSP14\| ubiquitin specific protease 14 |
| | | (tRNA-guanine transglycosylase) >gi\|1729927\|sp\|P54578\|TGT_HUMAN |
| | | QUEUINE TRNA-RIBOSYLTRANSFERASE (TRNA-GUANINE |
| | | TRANSGLYCOSYLASE) (GUANINE INSERTION ENZYME) >gi\|940182 (U30888) |
| | | tRNA-Guanine Transglycosylase [Homo sapiens] Length = 494 |
| 538 | 2027538 | 3′ 8E-44 >gi\|4240116\|dbj\|BAA74837\| (AB007799) NADH-cytochrome b5 |
| | | reductase [Arabidopsis thaliana] >gi\|4240118\|dbj\|BAA74838\| (AB007800) NADH- |
| | | cytochrome b5 reductase [Arabidopsis thaliana] Length = 281 |
| 539 | 2027539 | 3′ Tyr_Phospho_Site(123-131) |
| 540 | 2027540 | 3′ Pkc_Phospho_Site(30-32) |
| 541 | 2027541 | 5′ Pkc_Phospho_Site(67-69) |
| 542 | 2027542 | 5′ 2E-33 >gi\|4469408\|gb\|AAD21248\| (AF116527) MADS box protein |
| | | FLOWERING LOCUS F [Arabidopsis thaliana] >gi\|4469410\|gb\|AAD21249\| |
| | | (AF116528) MADS box protein FLOWERING LOCUS F [Arabidopsis thaliana] |
| | | Length = 196 |
| 543 | 2027543 | 5′ Rgd(488-490) |
| 544 | 2027544 | 5′ 4E-14 >gi\|728867\|sp\|P40602\|APG_ARATH ANTER-SPECIFIC PROLINE- |
| | | RICH PROTEIN APG PRECURSOR >gi\|99694\|pir∥S21961 proline-rich protein |
| | | APG - Arabidopsis thaliana >gi\|22599\|emb\|CAA42925\| (X60377) APG |
| | | [Arabidopsis thaliana] Length = 534 |
| 545 | 2027545 | 4E-16 >emb\|CAB57788.1\| (AJ250130) transcripton factor [Anabaena |
| | | PCC7120] Length = 319 |
| 546 | 2027546 | 1E-73 >sp\|P42801\|INO1_ARATH MYO-INOSITOL-1-PHOSPHATE |
| | | SYNTHASE (IPS) >gi\|1161312 (U04876) myo-inositol-1-phosphate synthase |
| | | [Arabidopsis thaliana] Length = 511 |
| 547 | 2027547 | Pkc_Phospho_Site(8-10) |
| 548 | 2027548 | Pkc_Phospho_Site(91-93) |
| 549 | 2027549 | Tyr_Phospho_Site(960-968) |
| 550 | 2027550 | 3E-95 >gb\|AAD25756.1\|AC007060_14 (AC007060) Contains the PF\|00650 |
| | | CRAL\|TRIO phosphatidyl-inositol-transfer protein domain. ESTs gb\|T76582, |
| | | gb\|N06574 and gb\|Z25700 come from this gene. [Arabidopsis thaliana] Length = |
| | | 540 |
| 551 | 2027551 | Pkc_Phospho_Site(153-155) |
| 552 | 2027552 | Tyr_Phospho_Site(11-19) |
| 553 | 2027553 | 4E-15 >sp\|Q03251\|GRP8_ARATH GLYCINE-RICH RNA-BINDING PROTEIN 8 |
| | | (CCR1 PROTEIN) >gi\|419756\|pir∥S30148 glycine-rich protein (clone AtGRP8) - |
| | | Arabidopsis thaliana >gi\|16305\|emb\|CAA78712\| (Z14988) glycine rich protein |
| | | [Arabidopsis thaliana] >gi\|166658 (L04171) ORF [Arabidopsis thaliana] >gi\|166839 |
| | | (L00649) RNA-binding protein [Arabidopsis thaliana] |
| | | >gi\|4914438\|emb\|CAB43641.1\| (AL050351) glycine-rich protein (clone AtGRP8) |
| | | [Arabidopsis thaliana] Length = 169 |
| 554 | 2027554 | 1E-89 >gb\|AAF00632.1\|AC009540_9 (AC009540) unknown protein [Arabidopsis |
| | | thaliana] Length = 318 |
| 555 | 2027555 | 4E-84 >gi\|4220474 (AC006069) myosin heavy chain [Arabidopsis |
| | | thaliana] Length = 629 |
| 556 | 2027556 | Tyr_Phospho_Site(593-599) |
| 557 | 2027557 | 2E-52 >sp\|P93568\|UGS2_SOLTU SOLUBLE GLYCOGEN [STARCH] |
| | | SYNTHASE PRECURSOR (SS I) >gi\|1781353\|emb\|CAA71442\| (Y10416) soluble |
| | | starch (bacterial glycogen) synthase [Solanum tuberosum] Length = 641 |
| 558 | 2027558 | Pkc_Phospho_Site(53-55) |
| 559 | 2027559 | 3E-16 >gi\|3170570 (AF058302) FrnE [Streptomyces roseofulvus] Length = |
| | | 216 |
| 560 | 2027560 | Pkc_Phospho_Site(45-47) |
| 561 | 2027561 | Tyr_Phospho_Site(62-70) |
| 562 | 2027562 | 1E-17 >gi\|3152569 (AC002986) Contains similarity to YELA protein |
| | | gb\|U63062 from Dictyostelium discoideum. [Arabidopsis thaliana] Length = 396 |
| 563 | 2027563 | Tyr_Phospho_Site(559-566) |
| 564 | 2027564 | Pkc_Phospho_Site(35-37) |
| 565 | 2027565 | 3′ Tyr_Phospho_Site(848-855) |
| 566 | 2027566 | 3′ 1E-28 >gi\|116229\|sp\|P29197\|CH60_ARATH CHAPERONIN CPN60, |
| | | MITOCHONDRIAL PRECURSOR (HSP60) >gi\|99676\|pir∥S20876 chaperonin |
| | | hsp60 precursor - Arabidopsis thaliana >gi\|16221\|emb\|CAA77646\| (Z11547) |
| | | chaperonin hsp60 [Arabidopsis thaliana] Length = 577 |
| 567 | 2027567 | 3′ Tyr_Phospho_Site(166-172) |
| 568 | 2027568 | 3′ Tyr_Phospho_Site(837-844) |
| 569 | 2027569 | 3′ 2E-35 >gi\|6324622\|ref\|NP_014691.1\|RAT1\| RNA trafficking protein; |
| | | transcription activator; Rat1p >gi\|417592\|sp\|Q02792\|RAT1_YEAST |
| | | RIBONUCLEIC ACID TRAFFICKING PROTEIN 1 (5′-3′ EXORIBONUCLEASE) |
| | | (P116) >gi\|83014\|pir∥S20126 exoribonuclease RAT1 (EC 3.1.11.-) - yeast |
| | | (Saccharomyces cerevisiae) > |
| 570 | 2027570 | 5′ 2E-15 >gi\|6358556\|gb\|AAF07233.1\| (AF146842) cyc1A protein [Antirrhinum |
| | | graniticum] >gi\|6358558\|gb\|AAF07235.1\| (AF146844) cyc1A protein [Antirrhinum |
| | | molle] Length = 270 |
| 571 | 2027571 | 5′ 6E-70 >gi\|1399267 (U31752) calmodulin-domain protein kinase |
| | | CDPK isoform 4 [Arabidopsis thaliana] >gi\|5916441\|gb\|AAD55952.1\|AC007633_1 |
| | | (AC007633) calmodulin-domain protein kinase CDPK isoform 4 (CPK4) |
| | | [Arabidopsis thaliana] Length = 501 |
| 572 | 2027572 | 5′ 8E-85 >gi\|2454182 (U80185) pyruvate dehydrogenase E1 alpha |
| | | subunit [Arabidopsis thaliana] Length = 428 |
| 573 | 2027573 | 5′ Pkc_Phospho_Site(112-114) |
| 574 | 2027574 | 5′ 1E-72 >gi\|5456946\|dbj\|BAA82396.1\| (AB022676) ribosomal protein S9 |
| | | [Arabidopsis thaliana] >gi\|5882726\|gb\|AAD55279.1\|AC008263_10 (AC008263) |
| | | Identical to gb\|AB022676 ribosomal protein S9 from Arabidopsis thaliana. ESTs |
| | | gb\|T13861, gb\|AA389790, gb\|T42539, gb\|AA586013, gb\|AA395093 and |
| | | gb\|AA041154 |
| 575 | 2027575 | 5′ 1E-57 >gi\|3273417 (U90446) RNAse L inhibitor [Mus musculus] |
| | | Length = 599 |
| 576 | 2027576 | 5′ Rgd(299-301) |
| 577 | 2027577 | 5′ 1E-12 >gi\|585013\|sp\|Q08257\|QOR_HUMAN QUINONE |
| | | OXIDOREDUCTASE (NADPH:QUINONE REDUCTASE) (ZETA-CRYSTALLIN) |
| | | >gi\|1070429\|pir∥PN0448 zeta-crystallin/quinone reductase (NADPH) (EC 1.6.-.-) |
| | | - human >gi\|292415 (L13278) zeta-crystallin [Homo sapiens] Length = 329 |
| 578 | 2027578 | 5′ 4E-24 >gi\|1399900\|sp\|Q02283\|HAT5_ARATH HOMEOBOX-LEUCINE |
| | | ZIPPER PROTEIN HAT5 (HD-ZIP PROTEIN 5) (HD-ZIP PROTEIN ATHB-1) |
| | | >gi\|99659\|pir∥S16325 homeotic protein Athb-1 - Arabidopsis thaliana |
| | | >gi\|16329\|emb\|CAA41625\| (X58821) Athb-1 protein [Arabidopsis thaliana] |
| | | >gi\|6016706\|gb\|AAF01532.1\|AC00932 |
| 579 | 2027579 | Tyr_Phospho_Site(814-821) |
| 580 | 2027580 | Pkc_Phospho_Site(58-60) |
| 581 | 2027581 | 7E-97 >gi\|2271485 (AF009647) arginine decarboxylase [Arabidopsis |
| | | thaliana] >gi\|3096940\|emb\|CAA18850.1\| (AL023094) arginine decarboxylase |
| | | SPE2 [Arabidopsis thaliana] Length = 711 |
| 582 | 2027582 | Pkc_Phospho_Site(25-27) |
| 583 | 2027583 | 6E-47 >sp\|Q41014\|FENS_PEA FERREDOXIN-NADP REDUCTASE, ROOT |
| | | ISOZYME PRECURSOR (FNR) Length = 377 |
| 584 | 2027584 | Tyr_Phospho_Site(109-115) |
| 585 | 2027585 | 6E-72 >gi\|4056416 (AC005322) Strong similarity to Dsor1 protein kinase |
| | | gb\|D13782 from Drosophila melanogaster. [Arabidopsis thaliana] Length = 339 |
| 586 | 2027586 | 5E-17 >emb\|CAA17763.1\| (AL022023) subtilisin proteinase-like [Arabidopsis |
| | | thaliana] Length = 764 |
| 587 | 2027587 | Tyr_Phospho_Site(588-596) |
| 588 | 2027588 | Pkc_Phospho_Site(19-21) |
| 589 | 2027589 | 7E-48 >sp\|P46283\|S17P_ARATH SEDOHEPTULOSE-1,7- |
| | | BISPHOSPHATASE, CHLOROPLAST PRECURSOR (SEDOHEPTULOSE- |
| | | BISPHOSPHATASE) (SBPASE) (SED(1,7)P2ASE) >gi\|1076403\|pir∥S51838 |
| | | sedoheptulose-1,7-biphosphatase - Arabidopsis thaliana >gi\|786466\|bbs\|159034 |
| | | (S74719) sedoheptulose-1,7-bisphosphatase, SBPase {EC 3.1.3.37} [Arabidopsis |
| | | thaliana, C24, Peptide Chloroplast, 393 aa] [Arabidopsis thaliana] Length = 393 |
| 590 | 2027590 | 4E-95 >gi\|2088653 (AF002109) Hs1pro-1 related protein isolog |
| | | [Arabidopsis thaliana] Length = 435 |
| 591 | 2027591 | Tyr_Phospho_Site(47-55) |
| 592 | 2027592 | Tyr_Phospho_Site(394-402) |
| 593 | 2027593 | 3′ Tyr_Phospho_Site(717-724) |
| 594 | 2027594 | 3′ 2E-28 >gi\|2811224 (AF042668) fimbrin 1 [Arabidopsis thaliana] |
| | | Length = 509 |
| 595 | 2027595 | 3′ 7E-43 >gi\|2335097 (AC002339) receptor-like protein kinase |
| | | [Arabidopsis thaliana] Length = 890 |
| 596 | 2027596 | 5′ 5E-42 >gi\|1737218 (U79959) vacuolar sorting receptor homolog |
| | | [Arabidopsis thaliana] Length = 623 |
| 597 | 2027597 | 5′ 4E-74 >gi\|3334409\|sp\|Q39258\|VATE _ARATH VACUOLAR ATP SYNTHASE |
| | | SUBUNIT E (V-ATPASE E SUBUNIT) >gi\|2129765\|pir∥S71261 V-type proton- |
| | | ATPase - Arabidopsis thaliana >gi\|1143394\|emb\|CAA63086\| (X92117) V-type |
| | | proton-ATPase [Arabidopsis thaliana] Length = 230 |
| 598 | 2027598 | 5′ Pkc_Phospho_Site(24-26) |
| 599 | 2027599 | Pkc_Phospho_Site(129-131) |
| 600 | 2027600 | Tyr_Phospho_Site(447-453) |
| 601 | 2027601 | Tyr_Phospho_Site(282-289) |
| 602 | 2027602 | Tyr_Phospho_Site(1212-1219) |
| 603 | 2027603 | Tyr_Phospho_Site(1013-1021) |
| 604 | 2027604 | 2E-65 >dbj\|BAA75015.1\| (AB023423) sulfate transporter [Arabidopsis |
| | | thaliana] Length = 631 |
| 605 | 2027605 | 1E-10 >gb\|AAD28800.1\| (AF146688) kelch protein [Fugu rubripes] Length = |
| | | 518 |
| 606 | 2027606 | Pkc_Phospho Site(19-21) |
| 607 | 2027607 | 2E-40 >emb\|CAB10300.1\| (Z97338) beta-amylase [Arabidopsis thaliana] |
| | | Length = 499 |
| 608 | 2027608 | Tyr_Phospho_Site(224-231) |
| 609 | 2027609 | 4E-36 >sp\|P27521\|CB24_ARATH CHLOROPHYLL A-B BINDING PROTEIN 4 |
| | | PRECURSOR (LHCI TYPE III CAB-4) (LHCP) >gi\|166646 (M63931) light- |
| | | harvesting chlorophyll a/b binding protein [Arabidopsis thaliana] Length = 251 |
| 610 | 2027610 | Tyr_Phospho_Site(103-110) |
| 611 | 2027611 | 9E-59 >sp\|P10797\|RBS3_ARATH RIBULOSE BISPHOSPHATE |
| | | CARBOXYLASE SMALL CHAIN 2B PRECURSOR (RUBISCO SMALL SUBUNIT |
| | | 2B) >gi\|68061\|pir∥RKMUB2 ribulose-bisphosphate carboxylase (EC 4.1.1.39) |
| | | small chain B2 precursor - Arabidopsis thaliana >gi\|16194\|emb\|CAA32701\| |
| | | (X14564) ribulose bisphosphate carboxylase [Arabidopsis thaliana] Length = 181 |
| 612 | 2027612 | Pkc_Phospo_Site(128-130) |
| 613 | 2027613 | 8E-43 >sp\|Q39258\|VATE_ARATH VACUOLAR ATP SYNTHASE SUBUNIT E |
| | | (V-ATPASE E SUBUNIT)>gi\|2129765\|pir∥S71261 V-type proton-ATPase - |
| | | Arabidopsis thaliana >gi\|1143394\|emb\|CAA63086\| (X92117) V-type proton- |
| | | ATPase [Arabidopsis thaliana] Length = 230 |
| 614 | 2027614 | Tyr_Phospho_Site(558-566) |
| 615 | 2027615 | 3′ 4E-45 >gi\|2979559 (AC003680) DNA binding protein [Arabidopsis |
| | | thaliana] Length = 356 |
| 616 | 2027616 | 5′ Tyr_Phospho_Site(195-202) |
| 617 | 2027617 | 5′ 4E-39 >gi\|4432865\|gb\|AAD20713\| (AC006300) cellulose synthase catalytic |
| | | subunit [Arabidopsis thaliana] Length = 1065 |
| 618 | 2027618 | 5′ 4E-40 >gi\|2492952\|sp\|Q42884\|ARC1_LYCES CHORISMATE SYNTHASE 1 |
| | | PRECURSOR (5-ENOLPYRUVYLSHIKIMATE-3-PHOSPHATE PHOSPHOLYASE |
| | | 1) >gi\|542026\|pir∥S40410 chorismate synthase (EC 4.6.1.4) 1 precursor - tomato |
| | | >gi\|410482\|emb\|CAA79859\| (Z21796) chorismate synthase 1 [Lycopersicon |
| | | esculentum] Length = |
| 619 | 2027619 | 5′ Tyr_Phospho_Site(115-123) |
| 620 | 2027620 | 2E-31 >dbj\|BAA25434.1\| (AB000708) SAUR [Raphanus sativus] Length = |
| | | 95 |
| 621 | 2027621 | 6E-47 >gb\|AAD57005.1\|AC009465_19 (AC009465) 405 ribosomal protein S3A |
| | | (S phase specific) [Arabidopsis thaliana] Length = 262 |
| 622 | 2027622 | 4E-74 ) >gi\|3482925 (AC003970) Highly similar to cinnamyl alcohol |
| | | dehydrogenase, gi\|1143445 [Arabidopsis thaliana] Length = 325 |
| 623 | 2027623 | 3E-69 ) >pir∥S71234 GTP-binding protein 3 - Arabidopsis thaliana |
| | | >gi\|2129701\|pir∥S71586 Rab11 homolog GTP-binding protein ATGB3 - |
| | | Arabidopsis thaliana >gi\|1184985 (U46926) ATGB3 [Arabidopsis thaliana] Length = |
| | | 224 |
| 624 | 2027624 | 2E-87 >gi\|3941528 (AF062918) transcription factor [Arabidopsis |
| | | thaliana] Length = 335 |
| 625 | 2027625 | 8E-13 >gi\|555655 (U06712) DNA-binding protein [Nicotiana tabacum] |
| | | Length = 546 |
| 626 | 2027626 | Tyr_Phospho_Site(189-197) |
| 627 | 2027627 | 2E-48 >emb\|CAB42045.1\| (AL049754) aspartate aminotransferase |
| | | [Streptomyces coelicolor] Length = 396 |
| 628 | 2027628 | 7E-15 >gi\|3668083 (AC004667) hypothetical protein [Arabidopsis |
| | | thaliana] Length = 402 |
| 629 | 2027629 | Pkc_Phospho_Site(41-43) |
| 630 | 2027630 | Pkc_Phospho_Site(70-72) |
| 631 | 2027631 | 2E-17 >sp\|P31169\|KIN2_ARATH STRESS-INDUCED KIN2 PROTEIN (COLD- |
| | | INDUCED COR6.6 PROTEIN) >gi\|1084343\|pir∥S22529 cold-regulated protein |
| | | kin2 - Arabidopsis thaliana >gi\|16230\|emb\|CAA38894\| (X55053) cold regulated |
| | | [Arabidopsis thal |
| 632 | 2027632 | 3E-59 ) >emb\|CAA63618\| (X93080) responsible for fatty acid elongation |
| | | from C28 to C30 [Arabidopsis thaliana] >gi\|1655786 (U40849) CER2 gene product |
| | | [Arabidopsis thaliana] >gi\|4220539\|emb\|CAA23012\| (AL035356) CER2 [Arabid |
| 633 | 2027633 | 1E-67 ) >sp\|Q38924\|PPAF_ARATH IRON(III)-ZINC(II) PURPLE ACID |
| | | PHOSPHATASE PRECURSOR (PAP) >gi\|1218042 (U48448) secreted purple acid |
| | | phosphatase precursor [Arabidopsis thaliana] Length = 469 |
| 634 | 2027634 | 6E-70 >sp\|P48981\|BGAL_MALDO BETA-GALACTOSIDASE PRECURSOR |
| | | (LACTASE) (EXO-(1−−>4)-BETA-D-GALACTANASE) >gi\|507278 (L29451) b- |
| | | galactosidase-related protein; [Malus domestica] Length = 731 |
| 635 | 2027635 | 5E-99 >pir∥S71268 beta-fructofuranosidase (EC 3.2.1.26) - Arabidopsis |
| | | thaliana (fragment) >gi\|1183868\|emb\|CAA64781\| (X95537) beta-fructosidase |
| | | [Arabidopsis thaliana] Length = 639 |
| 636 | 2027636 | 3′ 2E-14 >gi\|3647341\|emb\|CAA21065\| (AL031644) RAD16 nucleotide excision |
| | | repair protein homolog [Schizosaccharomyces pombe] Length = 963 |
| 637 | 2027637 | 3′ 2E-22 >gi\|2586153 (AF001530) ripening-associated protein [Musa |
| | | acuminata] Length = 68 |
| 638 | 2027638 | 3′ Tyr_Phospho_Site(126-133) |
| 639 | 2027639 | 3′ 3E-24 >gi\|166410 (L07291) Alfin-1 [Medicago sativa] Length = 258 |
| 640 | 2027640 | 3′ Tyr_Phospho_Site(331-339) |
| 641 | 2027641 | 3′ 3E-38 >gi\|231536\|sp\|P30184\|AMPL_ARATH CYTOSOL AMINOPEPTIDASE |
| | | (LEUCINE AMINOPEPTIDASE) (LAP) (LEUCYL AMINOPEPTIDASE) (PROLINE |
| | | AMINOPEPTIDASE) (PROLYL AMINOPEPTIDASE) >gi\|99683\|pir∥S22399 leucyl |
| | | aminopeptidase (EC 3.4.11.1) - Arabidopsis thaliana >gi\|16394\|emb\|CAA45040\| |
| | | (X63444) leucine amin |
| 642 | 2027642 | 5′ 4E-15 >gi\|2622711 (AE000918) ferripyochelin binding protein |
| | | [Methanobacterium thermoautotrophicum] Length = 151 |
| 643 | 2027643 | 5′ 2E-83 >gi\|5052357\|gb\|AAD38519.1\|AF138281_1 (AF138281) phospholipase |
| | | D-gamma-2 [Arabidopsis thaliana] Length = 827 |
| 644 | 2027644 | 5′ Tyr_Phospho_Site(152-158) |
| 645 | 2027645 | 5′ Tyr_Phospho_Site(287-294) |
| 646 | 2027646 | 5′ Spase_I_1(753-760) |
| 647 | 2027647 | 5′ 2E-54 >gi\|4886264\|emb\|CAB43399.1\| (AJ006292) Myb-related transcription |
| | | factor mixta-like 1 [Antirrhinum majus] Length = 359 |
| 648 | 2027648 | 5′ 1E-68 >gi\|11346754\|sp\|P48482\|PP12_ARATH SERINE/THREONINE |
| | | PROTEIN PHOSPHATASE PP1 ISOZYME 2 >gi\|421851\|pir∥S31086 |
| | | phosphoprotein phosphatase (EC 3.1.3.16) 1 catalytic chain (clone TOPP2) - |
| | | Arabidopsis thaliana >gi\|166797 (M93409) catalytic subunit [Arabidopsis thaliana] |
| | | Length = 312 |
| 649 | 2027649 | Tyr_Phospho_Site(236-243) |
| 650 | 2027650 | 6E-63 >gi\|2281103 (AC002333) Glucan endo-1,3-beta glucosidase |
| | | isolog [Arabidopsis thaliana] Length = 120 |
| 651 | 2027651 | Pkc_Phospho_Site(44-46) |
| 652 | 2027652 | 3E-85 >emb\|CAA23048.1\| (AL035394) polygalacturonase [Arabidopsis |
| | | thaliana] Length = 444 |
| 653 | 2027653 | Tyr_Phospho_Site(727-734) |
| 654 | 2027654 | 2E-49 >gi\|3236242 (AC004684) ribosomal protein L36 [Arabidopsis |
| | | thaliana] Length = 113 |
| 655 | 2027655 | 1E-47 >dbj\|BAA18309\| (D90913) PET112 [Synechocystis sp.] Length = |
| | | 519 |
| 656 | 2027656 | 9E-30 >gi\|3885334 (AC005623) argonaute protein [Arabidopsis thaliana] |
| | | Length = 930 |
| 657 | 2027657 | Tyr_Phospho_Site(206-212) |
| 658 | 2027658 | Tyr_Phospho_Site(186-193) |
| 659 | 2027659 | 5E-19 >gb\|AAD49757.1\|AC007932_5 (AC007932) Contains PF\|00646 F-box |
| | | domain. [Arabidopsis thaliana] Length = 513 |
| 660 | 2027660 | Pkc_Phospho_Site(11-13) |
| 661 | 2027661 | 1E-76 >emb\|CAA11554\| (AJ223804) 2-oxoglutarate dehydrogenase, E3 |
| | | subunit [Arabidopsis thaliana] Length = 472 |
| 662 | 2027662 | Tyr_Phospho_Site(45-51) |
| 663 | 2027663 | Tyr_Phospho_Site(913-920) |
| 664 | 2027664 | 3′ 1E-45 >gi\|5103807\|gb\|AAD39637.1\|AC007591_2 (AC007591) Contains |
| | | similarity to gb\|AF014403 type-2 phosphatidic acid phosphatase alpha-2 |
| | | (PAP2_a2) from Homo sapiens. ESTs gb\|T88254 and gb\|AA394650 come from |
| | | this gene. [Arabidopsis thaliana] Length = 290 |
| 665 | 2027665 | 3′ 6E-19 >gi\|3242714 (AC003040) hypersensitivity-related protein |
| | | [Arabidopsis thaliana] Length = 451 |
| 666 | 2027666 | 3′ Pkc_Phospho_Site(16-18) |
| 667 | 2027667 | 3′ Pkc_Phospho_Site(14-16) |
| 668 | 2027668 | 3′ Pkc_Phospho_Site(55-57) |
| 669 | 2027669 | 5′ Pkc_Phospho_Site(7-9) |
| 670 | 2027670 | 5′ 1E-82 >gi\|4467104\|emb\|CAB37538\| (AL035538) cinnamyl-alcohol |
| | | dehydrogenase ELI3-1 [Arabidopsis thaliana] Length = 357 |
| 671 | 2027671 | 5′ 6E-11 >gi\|3861337\|emb\|CAA15236\| (AJ235273) GLUTATHIONE- |
| | | REGULATED POTASSIUM-EFFLUX SYSTEM PROTEIN KEFB (kefB) [Rickettsia |
| | | prowazekii] Length = 575 |
| 672 | 2027672 | 5′ Pkc_Phospho_Site(55-57) |
| 673 | 2027673 | 5′ Tyr_Phospho_Site(51-58) |
| 674 | 2027674 | 5′ Tyr_Phospho_Site(551-557) |
| 675 | 2027675 | 5′ Tyr_Phospho_Site(68-75) |
| 676 | 2027676 | 5′ Pkc_Phospho_Site(209-211) |
| 677 | 2027677 | 5′ 2E-34 >gi\|3493131 (AF081570) thymidylate kinase [Arabidopsis |
| | | thaliana] Length = 188 |
| 678 | 2027678 | Tyr_Phospho_Site(742-749) |
| 679 | 2027679 | 4E-87 >gb\|AAD55658.1\|AC008017_31 (AC008017) Highly similar to ribulose-1,5- |
| | | bisphosphate carboxylase/oxygenase activase [Arabidopsis thaliana] Length = 245 |
| 680 | 2027680 | 4E-49 >gb\|AAD18101\| (AC006403) prolylcarboxypeptidase, 5′ partial |
| | | [Arabidopsis thaliana] Length = 168 |
| 681 | 2027681 | 3E-11 >emb\|CAB44762.1\| (AL078627) actin-like protein; (2 actin domains) |
| | | [Schizosaccharomyces pombe] Length = 721 |
| 682 | 2027682 | 3E-56 >gi\|4185141 (AC005724) calmodulin-binding protein [Arabidopsis |
| | | thaliana] Length = 652 |
| 683 | 2027683 | 4E-20 >sp\|P25070\|TCH2_ARATH CALMODULIN-RELATED PROTEIN 2, |
| | | TOUCH-INDUCED >gi\|2583169 (AF026473) calmodulin-related protein |
| | | [Arabidopsis thaliana] Length = 161 |
| 684 | 2027684 | 1E-106 >pir∥A57072 disease resistance protein RPM1 -Arabidopsis |
| | | thaliana >gi\|963017\|emb\|CAA61131\| (X87851) disease resistance gene |
| | | [Arabidopsis thaliana] Length = 926 |
| 685 | 2027685 | 1E-63 >sp\|P43297\|RD21_ARATH CYSTEINE PROTEINASE RD21A |
| | | PRECURSOR >gi\|541857\|pir∥JN0719 drought-inducible cysteine proteinase (EC |
| | | 3.4.22.-) RD21A precursor - Arabidopsis thaliana >gi\|435619\|dbj\|BAA02374\| |
| | | (D13043) thiol protease [Arabidopsis thaliana] Length = 462 |
| 686 | 2027686 | 4E-17 >gb\|AAD17415\| (AC006248) serine/threonine kinase [Arabidopsis |
| | | thaliana] Length = 365 |
| 687 | 2027687 | 5E-24 >gb\|AAD48947.1\|AF147262_10 (AF147262) contains similarity to the Pfam |
| | | family PF00646 - F-box domain; score=10.1, E=1.2, N=1 [Arabidopsis thaliana] |
| | | Length = 554 |
| 688 | 2027688 | 8E-32 >gb\|AAD39612.1\|AC007454_11 (AC007454) Similar to gb\|X92204 NAM |
| | | gene product from Petunia hybrida. ESTs gb\|H36656 and gb\|AA651216 come |
| | | from this gene. [Arabidopsis thaliana] Length = 557 |
| 689 | 2027689 | 5E-76 >sp\|P53493\|ACT3 _ARATH ACTIN 3 >gi\|2129526\|pir∥S68112 actin 3 - |
| | | Arabidopsis thaliana >gi\|1145695 (U39480) actin [Arabidopsis thaliana] |
| | | >gi\|3236244 (AC004684) actin 3 protein [Arabidopsis thaliana] Length = 377 |
| 690 | 2027690 | Pkc_Phospho_Site(62-64) |
| 691 | 2027691 | 3E-57 >gi\|2921158 (AF022909) ClpC [Arabidopsis thaliana] Length = |
| | | 928 |
| 692 | 2027692 | 1E-14 >dbj\|BAA20519\| (AB004798) ascorbate oxidase [Arabidopsis |
| | | thaliana] Length = 567 |
| 693 | 2027693 | 2E-44 >sp\|P93836\|HPPD_ARATH 4-HYDROXYPHENYLPYRUVATE |
| | | DIOXYGENASE (4HPPD) (HPD) >gi\|2145039 (AF000228) p- |
| | | hydroxyphenylpyruvate dioxygenase [Arabidopsis thaliana] >gi\|2392518 (U89267) |
| | | p-hydroxyphenylpyruvate dioxygenase [Arabidopsis thaliana] |
| | | >gi\|3098559\|gb\|AAC15697.1\| (AF047834) 4-hydroxyphenylpyruvate dioxygenase |
| | | [Arabidopsis thaliana] Length = 445 |
| 694 | 2027694 | 2E-23 >gi\|2623297 (AC002409) unknown protein [Arabidopsis thaliana] |
| | | >gi\|3790583 (AF079180) RING-H2 finger protein RHC1a [Arabidopsis thaliana] |
| | | Length = 328 |
| 695 | 2027695 | 1E-82 >gb\|AAC34238.1\| (AC004411) pectinacetylesterase precursor |
| | | [Arabidopsis thaliana] Length = 416 |
| 696 | 2027696 | 2E-52 >pir∥S18600 glutamate-ammonia ligase (EC 6.3.1.2) precursor, |
| | | chloroplast (clone lambdaAtgsI1) - Arabidopsis thaliana >gi\|240070\|bbs\|69728 |
| | | (S69727) light-regulated glutamine synthetase isoenzyme [Arabidopsis thaliana, |
| | | Peptide, 430 aa] [Arabidopsis thaliana] >gi\|228453\|prf∥1804333A Gln synthetase |
| | | [Arabidopsis thaliana] Length = 430 |
| 697 | 2027697 | Tyr_Phospho_Site(532-540) |
| 698 | 2027698 | 3′ Tyr_Phospho_Site(65-72) |
| 699 | 2027699 | 3′ Pkc_Phospho_Site(2-4) |
| 700 | 2027700 | 5′ Tyr_Phospho_Site(543-549) |
| 701 | 2027701 | 5′ 6E-81 >gi\|6175146\|gb\|AAF04873.1\|AC010796_9 (AC010796) alliinase |
| | | [Arabidopsis thaliana] >gi\|6453901\|gb\|AAF09084.1\|AC011663_20 (AC011663) |
| | | alliinase [Arabidopsis thaliana] Length = 391 |
| 702 | 2027702 | 5′ Pkc_Phospho_Site(62-64) |
| 703 | 2027703 | 5′ 7E-11 >gi\|1497987 (U62798) SCARECROW [Arabidopsis thaliana] |
| | | Length = 653 |
| 704 | 2027704 | 5′ Tyr_Phospho_Site(585-592) |
| 705 | 2027705 | 5′ Tyr_Phospho_Site(234-242) |
| 706 | 2027706 | 5′ Tyr_Phospho_Site(824-832) |
| 707 | 2027707 | 1E-42 >gb\|AAD39329.1\|AC007258_18 (AC007258) ABC transporter |
| | | [Arabidopsis thaliana] Length = 1469 |
| 708 | 2027708 | Tyr_Phospho_Site(155-162) |
| 709 | 2027709 | 2E-96 >emb\|CAB43705.1\| (AJ242650) cytosolic phosphoglucomutase |
| | | [Arabidopsis thaliana] Length = 507 |
| 710 | 2027710 | Pkc_Phospho_Site(9-11) |
| 711 | 2027711 | Pkc_Phospho_Site(18-20) |
| 712 | 2027712 | 1E-64 >gi\|2979565 (AC003680) sin3 associated polypeptide (SAP18) |
| | | [Arabidopsis thaliana] Length = 152 |
| 713 | 2027713 | 2E-61 >gi\|2209332 (U89272) chloroplast membrane protein ALBINO3 |
| | | [Arabidopsis thaliana] >gi\|3927828 (AC005727) chloroplast membrane protein |
| | | ALBINO3 [Arabidopsis thaliana] Length = 462 |
| 714 | 2027714 | 1E-51 >gb\|AAD46000.1\|AC005916_12 (AC005916) Contains similarity to |
| | | gb\|AF113001 silencing mediator of retinoic acid and thyroid hormone receptor |
| | | alpha and gb\|AF109179 cyclin T1 from Mus musculus. ESTs gb\|N95317, |
| | | gb\|Z29139 and gb\|Z3 |
| 715 | 2027715 | 2E-45 >emb\|CAA76074\| (Y16124) cullin protein [Lycopersicon |
| | | esculentum] Length = 615 |
| 716 | 2027716 | 2E-22 >sp\|Q42577\|NUKM_ARATH NADH-UBIQUINONE OXIDOREDUCTASE |
| | | 20 KD SUBUNIT PRECURSOR (COMPLEX I-20 KD) (CI-20 KD) |
| | | >gi\|1084345\|pir∥S52286 NADH dehydrogenase (EC 1.6.99.3) - Arabidopsis |
| | | thaliana >gi\|643090\|emb\|CAA58887.1\| (X84078) NADH dehydrogenase |
| | | [Arabidopsis thaliana] Length = 218 |
| 717 | 2027717 | Tyr_Phospho_Site(868-874) |
| 718 | 2027718 | 7E-35 >emb\|CAA11414\| (AJ223496) phosphoenolpyrovate carboxylase |
| | | [Brassica juncea] Length = 964 |
| 719 | 2027719 | 1E-45 >sp\|Q05999\|KPK7_ARATH SERINE/THREONINE-PROTEIN KINASE |
| | | PK7 >gi\|320562\|pir∥JC1385 protein kinase (EC 2.7.1.37) - Arabidopsis thaliana |
| | | >gi\|303500\|dbj\|BAA01716.1\| (D10910) serine/threonine protein kinase |
| | | [Arabidopsis thaliana] Length = 578 |
| 720 | 2027720 | 3′ Pkc_Phospho_Site(75-77) |
| 721 | 2027721 | 3′ Pkc_Phospho_Site(36-38) |
| 722 | 2027722 | 3′ 2E-35 >gi\|2191136 (AF007269) Similar to UTP-Glucose |
| | | Glucosyltransferase; coded for by A. thaliana cDNA T46230; coded for by A. |
| | | thaliana cDNA H76538; coded for by A. thaliana cDNA H76290 [Arabidopsis |
| | | thaliana] Length = 462 |
| 723 | 2027723 | 3′ 9E-16 >gi\|5360593\|dbj\|BAA82068.1\| (AB022329) nClpP4 [Arabidopsis |
| | | thaliana] Length = 299 |
| 724 | 2027724 | 3′ Tyr_Phospho_Site(460-467) |
| 725 | 2027725 | 5′ Pkc_Phospho_Site(132-134) |
| 726 | 2027726 | 5′ 3E-31 >gi\|3176714 (AC002392) tRNA-splicing endonuclease |
| | | positive effector [Arabidopsis thaliana] Length = 1090 |
| 727 | 2027727 | 5′ Tyr_Phospho_Site(206-212) |
| 728 | 2027728 | 5′ Pkc_Phospho_Site(43-45) |
| 729 | 2027729 | 5′ 1E-21 >gi\|2497996\|sp\|Q56239\|MUTS_THETH DNA MISMATCH REPAIR |
| | | PROTEIN MUTS Length = 819 |
| 730 | 2027730 | 5′ 3E-15 >gi\|5803181\|ref\|NP_006810.1\|pSTIP1\| stress-induced-phosphoprotein |
| | | 1 (Hsp70/Hsp90-organizing protein) >gi\|400042\|sp\|P31948\|IEFS_HUMAN |
| | | TRANSFORMATION-SENSITIVE PROTEIN IEF SSP 3521 |
| | | >gi\|539700\|pir∥A38093 transformation-sensitive protein IEF SSP 3521 - human |
| | | >gi\|184565 (M86752) transform |
| 731 | 2027731 | 3E-36 >dbj\|BAA77204.1\| (AB026262) ring finger protein [Cicer arietinum] |
| | | Length = 131 |
| 732 | 2027732 | 1E-75 >gi\|3421090 (AF043525) 20S proteasome subunit PAE2 |
| | | [Arabidopsis thaliana] Length = 237 |
| 733 | 2027733 | 6E-62 >gb\|AAD32905.1\|AC007584_3 (AC007584) Mlo protein [Arabidopsis |
| | | thaliana] Length = 574 |
| 734 | 2027734 | 3E-23 >gi\|3128168 (AC004521) carboxyl-terminal peptidase |
| | | [Arabidopsis thaliana] Length = 415 |
| 735 | 2027735 | 1E-36 >ref\|NP_002262.1\|PKPNB3\| karyopherin (importin) beta 3 >gi\|2102696 |
| | | (U72761) karyopherin beta 3 [Homo sapiens] Length = 1097 |
| 736 | 2027736 | 3E-38 >emb\|CAA07251\| (AJ006787) phytochelatin synthetase |
| | | [Arabidopsis thaliana] Length = 362 |
| 737 | 2027737 | 7E-44 >dbj\|BAA33803\| (AB018412) chloroplast phosphoglycerate kinase |
| | | [Populus nigra] Length = 481 |
| 738 | 2027738 | 2E-16 >sp\|P46032\|PT2B_ARATH PEPTIDE TRANSPORTER PTR2-B |
| | | (HISTIDINE TRANSPORTING PROTEIN) >gi\|633940 (L39082) transport protein |
| | | [Arabidopsis thaliana] >gi\|4406786\|gb\|AAD20096\| (AC006532) histidine transport |
| | | protein PTR2-B [Arabidopsis thaliana] Length = 585 |
| 739 | 2027739 | Thiol_Protease_Cys(190-201) |
| 740 | 2027740 | 3E-43 >gi\|1657617 (U72503) G2p [Arabidopsis thaliana] >gi\|3068707 |
| | | (AF049236) nuclear DNA-binding protein G2p [Arabidopsis thaliana] Length = 392 |
| 741 | 2027741 | 3E-66 ) >gi\|3201633 (AC004669) cell division protein [Arabidopsis |
| | | thaliana] Length = 695 |
| 742 | 2027742 | 1E-153 >gi\|2895866 (AF045770) methylmalonate semi-aldehyde |
| | | dehydrogenase [Oryza sativa] Length = 532 |
| 743 | 2027743 | 3′ 3E-20 >gi\|1871182 (U90439) phospholipase D isolog [Arabidopsis |
| | | thaliana] Length = 832 |
| 744 | 2027744 | 5′ 1E-32 >gi\|5031737\|ref\|NP_005785.1\|pHEP27\| short-chain alcohol |
| | | dehydrogenase family member >gi\|2135333\|pir∥S66665 Hep27 protein - human |
| | | >gi\|1079566 (U31875) Hep27 protein [Homo sapiens] Length = 280 |
| 745 | 2027745 | 5′ Tyr_Phospho_Site(3-11) |
| 746 | 2027746 | 5′ Tyr_Phospho_Site(92-100) |
| 747 | 2027747 | 5′ Zinc_Finger_C2h2(594-616) |
| 748 | 2027748 | 5′ 6E-68 >gi\|116229\|sp\|P29197\|CH60_ARATH CHAPERONIN CPN60, |
| | | MITOCHONDRIAL PRECURSOR (HSP60) >gi\|99676\|pir∥S20876 chaperonin |
| | | hsp60 precursor - Arabidopsis thaliana >gi\|16221\|emb\|CAA77646\| (Z11547) |
| | | chaperonin hsp60 [Arabidopsis thaliana] Length = 577 |
| 749 | 2027749 | 2E-53 >gi\|2246456 (U71400) S-adenosyl-methionine-sterol-C- |
| | | methyltransferase [Arabidopsis thaliana] Length = 359 |
| 750 | 2027750 | Pkc_Phospho_Site(48-50) |
| 751 | 2027751 | Pkc_Phospho_Site(12-14) |
| 752 | 2027752 | 1E-43 >gb\|AAD17313\| (AF123310) NAC domain protein NAM |
| | | [Arabidopsis thaliana] >gi\|4325286\|gb\|AAD17314\| (AF123311) NAC domain |
| | | protein NAM [Arabidopsis thaliana] Length = 320 |
| 753 | 2027753 | Tyr_Phospho_Site(65-72) |
| 754 | 2027754 | Pkc_Phospho_Site(38-40) |
| 755 | 2027755 | Tyr_Phospho_Site(422-430) |
| 756 | 2027756 | 1E-58 >sp\|O23717\|PRCE_ARATH PROTEASOME EPSILON CHAIN |
| | | PRECURSOR (MACROPAIN EPSILON CHAIN) (MULTICATALYTIC |
| | | ENDOPEPTIDASE COMPLEX EPSILON CHAIN) >gi\|2511596\|emb\|CAA74029.1\| |
| | | (Y13695) multicatalytic endopeptidase complex, proteasome precursor, beta |
| | | subunit [Arabidopsis thaliana] >gi\|3421117 (AF043536) 20S proteasome beta |
| | | subunit PBE1 [Arabidopsis thaliana] >gi\|4850389\|gb\|AAD31059.1\|AC007357_8 |
| | | (AC007357) Identical to gb\|Y13695 multicatalytic endopeptidase complex, |
| | | proteasome precursor, beta subunit (prce) from Arabidopsis thaliana. ESTs |
| | | gb\|Y09360, gb\|F13852, gb\|T20555, gb\|T44620, gb\|AI099779 and gb\|AA5861 . . . |
| | | Length = 274 |
| 757 | 2027757 | Tyr_Phospho_Site(829-836) |
| 758 | 2027758 | 2E-18 >gi\|1408294 (U61983) benzyl alcohol dehydrogenase |
| | | [Acinetobacter calcoaceticus] Length = 371 |
| 759 | 2027759 | 2E-51 >gi\|3421123 (AF043538) 20S proteasome beta subunit PBG1 |
| | | [Arabidopsis thaliana] Length = 246 |
| 760 | 2027760 | Pkc_Phospho_Site(71-73) |
| 761 | 2027761 | Tyr_Phospho_Site(1182-1190) |
| 762 | 2027762 | 1E-36 >emb\|CAA08757\| (AJ009608) BnMAP4K alpha1 [Brassica napus] |
| | | Length = 684 |
| 763 | 2027763 | 3E-27 >gi\|3135611 (AF062485) cellulose synthase [Arabidopsis thaliana] |
| | | Length = 1081 |
| 764 | 2027764 | 3′ 1E-25 >gi\|6094558\|gb\|AAF03500.1\|AC010676_10 (AC010676) aldose 1- |
| | | epimerase, 3′ partial [Arabidopsis thaliana] Length = 323 |
| 765 | 2027765 | 3′ 2E-28 >gi\|6174930\|sp\|Q13200\|PSD2_HUMAN 26S PROTEASOME |
| | | REGULATORY SUBUNIT S2 (P97) (TUMOR NECROSIS FACTOR TYPE 1 |
| | | RECEPTOR ASSOCIATED PROTEIN 2) (55.11 PROTEIN) Length = 908 |
| 766 | 2027766 | 5′ 1E-13 >gi\|2622943 (AE000934) N-carbamoyl-D-amino acid |
| | | amidohydrolase [Methanobacterium thermoautotrophicum] Length = 272 |
| 767 | 2027767 | 5′ 2E-32 >gi\|5052353\|gb\|AAD38517.1\|AF135422_1 (AF135422) GDP-mannose |
| | | pyrophosphorylase A [Homo sapiens] Length = 399 |
| 768 | 2027768 | 2E-48 >sp\|Q96252\|ATP4_ARATH ATP SYNTHASE DELTA′ CHAIN, |
| | | MITOCHONDRIAL PRECURSOR >gi\|1655484\|dbj\|BAA13601\| (D88376) delta- |
| | | prime subunit of mitochondrial F1-ATPase [Arabidopsis thaliana] Length = 203 |
| 769 | 2027769 | 3E-77 >gb\|AAD31349.1\|AC007212_5 (AC007212) MAP kinase 7 [Arabidopsis |
| | | thaliana] Length = 368 |
| 770 | 2027770 | Pkc_Phospho_Site(131-133) |
| 771 | 2027771 | Pkc_Phospho_Site(44-46) |
| 772 | 2027772 | Tyr_Phospho_Site(870-878) |
| 773 | 2027773 | Tyr_Phospho_Site(438-444) |
| 774 | 2027774 | 5E-81 ) >emb\|CAB37533\| (AL035538) glycine hydroxymethyltransferase |
| | | like protein [Arabidopsis thaliana] Length = 517 |
| 775 | 2027775 | 4E-65 >gb\|AAD39329.1\|AC007258_18 (AC007258) ABC transporter |
| | | [Arabidopsis thaliana] Length = 1469 |
| 776 | 2027776 | Tyr_Phospho_Site(679-687) |
| 777 | 2027777 | 5E-94 >emb\|CAA74281\| (Y13943) MEtRS [Arabidopsis thaliana] Length = |
| | | 616 |
| 778 | 2027778 | 1E-96 >gb\|AAD17428\| (AC006284) methyltransferase [Arabidopsis |
| | | thaliana] Length = 619 |
| 779 | 2027779 | Tyr_Phospho_Site(449-456) |
| 780 | 2027780 | 1E-126 >gb\|AAD32767.1\|A007661_4 (AC007661) steroid reducatase |
| | | [Arabidopsis thaliana] Length = 262 |
| 781 | 2027781 | 1E-82 >gi\|3193317 (AF069299) similar to plant chalcone and stilbene |
| | | synthases [Arabidopsis thaliana] Length = 385 |
| 782 | 2027782 | Pkc_Phospho_Site(35-37) |
| 783 | 2027783 | Tyr_Phospho_Site(1118-1125) |
| 784 | 2027784 | 3E-72 >gi\|4191788 (AC005917) 1-aminocyclopropane-1-carboxylate |
| | | oxidase [Arabidopsis thaliana] Length = 310 |
| 785 | 2027785 | Tyr_Phospho_Site(687-695) |
| 786 | 2027786 | 1E-26 >gb\|AAD21706.1\| (AC007048) tyrosine transaminase [Arabidopsis |
| | | thaliana] Length = 462 |
| 787 | 2027787 | Pkc_Phospho_Site(8-10) |
| 788 | 2027788 | 3′ Tyr_Phospho_Site(826-832) |
| 789 | 2027789 | 3′ Tyr_Phospho_Site(471-479) |
| 790 | 2027790 | 5′ 3E-17 >gi\|1170182\|sp\|P43273\|HBPB_ARATH TRANSCRIPTION FACTOR |
| | | HBP-1B >gi\|479793\|pir∥S35439 transcription factor HBP-1b homolog - |
| | | Arabidopsis thaliana >gi\|217827\|dbj\|BAA00933\| (D10042) AHBP-1b [Arabidopsis |
| | | thaliana] Length = 330 |
| 791 | 2027791 | 5′ 4E-13 >gi\|6223639\|gb\|AAF05853.1\|AC011698_4 (AC011698) casein kinase |
| | | [Arabidopsis thaliana] Length = 701 |
| 792 | 2027792 | 5′ Tyr_Phospho_Site(425-433) |
| 793 | 2027793 | 5′ Tyr_Phospho_Site(722-730) |
| 794 | 2027794 | 5E-48 >sp\|Q42522\|GSA2_ARATH GLUTAMATE-1-SEMIALDEHYDE 2,1- |
| | | AMINOMUTASE 2 PRECURSOR (GSA 2) (GLUTAMATE-1-SEMIALDEHYDE |
| | | AMINOTRANSFERASE 2) (GSA-AT 2) >gi\|498914 (U10278) glutamate-1- |
| | | semialdehyde aminotransferase [Arabidopsis thaliana] Length = 472 |
| 795 | 2027795 | Tyr_Phospho_Site (42-50) |
| 796 | 2027796 | Tyr_Phospho_Site(18-24) |
| 797 | 2027797 | Pkc_Phospho_Site(72-74) |
| 798 | 2027798 | 2E-50 >gi\|3402692 (AC004697) CDP-diacylglycerol-glycerol-3- |
| | | phosphate 3-phosphatidyltransferase [Arabidopsis thaliana] Length = 296 |
| 799 | 2027799 | 1E-41 >pir∥S46226 ammonium transport protein - Arabidopsis thaliana |
| | | Length = 501 |
| 800 | 2027800 | 4E-67 >gi\|4056480(AC005896) adenylate kinase [Arabidopsis thaliana] |
| | | Length = 284 |
| 801 | 2027801 | Pkc_Phospho_Site (13-15) |
| 802 | 2027802 | Tyr_Phospho_Site(863-870) |
| 803 | 2027803 | 4E-77 >gb\|AAD25780.1\|AC006577_16 (AC006577) Similar to gb\|U55861 RNA |
| | | binding protein nucleolysin (TIAR) from Mus musculus and contains several |
| | | PF\|00076 RNA recognition motif domains. ESTs gb\|T21032 and gb\|T44127 come |
| | | from this gen |
| 804 | 2027804 | Tyr_Phospho_Site(225-233) |
| 805 | 2027805 | Tyr_Phospho_Site(185-191) |
| 806 | 2027806 | 4E-41 >sp\|P24636\|TBB4_ARATH TUBULIN BETA-4 CHAIN |
| | | >gi\|2129546\|pir∥S68122 beta-tubulin 4 - Arabidopsis thaliana >gi\|166640 |
| | | (M21415) beta-tubulin [Arabidopsis thaliana] Length = 444 |
| 807 | 2027807 | 3′ 2E-13 >gi\|1617274\|emb\|CAA96522\| (Z72152) AMP-binding protein [Brassica |
| | | napus] Length = 677 |
| 808 | 2027808 | 3′ Tyr_Phospho_Site(511-518) |
| 809 | 2027809 | 3′ 3E-11 >gi\|2632252\|emb\|CAA73067\| (Y12464) serine/threonine kinase |
| | | [Sorghum bicolor] Length = 440 |
| 810 | 2027810 | 3′ Tyr_Phospho_Site(370-377) |
| 811 | 2027811 | 3′ 5E-29 >gi\|3702314 (AC002535) similar to SWI/SNF complex |
| | | subunit BAF170 [Arabidopsis thaliana] Length = 435 |
| 812 | 2027812 | 5′ Tyr_Phospho_Site(242-248) |
| 813 | 2027813 | 5′ Pkc_Phospho_Site(17-19) |
| 814 | 2027814 | 5′ 5E-16 >gi\|870743\|dbj\|BAA09522\| (D55671) heterogeneous nuclear |
| | | ribonucleoprotein D (hnRNP D) [Homo sapiens] Length = 267 |
| 815 | 2027815 | 5′ 2E-13 >gi\|1172704\|sp\|P46032\|PT2B_ARATH PEPTIDE TRANSPORTER |
| | | PTR2-B (HISTIDINE TRANSPORTING PROTEIN) >gi\|633940 (L39082) transport |
| | | protein [Arabidopsis thaliana] >gi\|4406786\|gb\|AAD20096\| (AC006532) histidine |
| | | transport protein PTR2-B [Arabidopsis thaliana] Length = 585 |
| 816 | 2027816 | 5′ Pkc_Phospho_Site(26-28) |
| 817 | 2027817 | 5′ Tyr_Phospho_Site(517-524) |
| 818 | 2027818 | 9E-63 >gi\|3785981 (AC005560) major latex protein [Arabidopsis |
| | | thaliana] Length = 151 |
| 819 | 2027819 | 1E-43 >gb\|AAD25805.1\|AC006550_13 (AC006550) Contains PF\|00010 helix- |
| | | loop-helix DNA-binding domain. ESTs gb\|T45640 and gb\|T22783 come from this |
| | | gene. [Arabidopsis thaliana] Length = 297 |
| 820 | 2027820 | 2E-66 >sp\|Q39024\|MPK4_ARATH MITOGEN-ACTIVATED PROTEIN KINASE |
| | | HOMOLOG 4 (MAP KINASE 4) (ATMPK4) >gi\|2129645\|pir∥S40470 mitogen- |
| | | activated protein kinase 4 (EC 2.7.1.-) - Arabidopsis thaliana |
| | | >gi\|457400\|dbj\|BAA04867\| (D21840) MAP kinase [Arabidopsis thaliana] Length = |
| | | 376 |
| 821 | 2027821 | Rgd(712-714) |
| 822 | 2027822 | Tyr_Phospho_Site(85-91) |
| 823 | 2027823 | 1E-107 >emb\|CAB56768.1\| (AJ132096) squamosa promoter binding |
| | | protein-like 12 [Arabidopsis thaliana] >gi\|6006403\|emb\|CAB56769.1\| (AJ132097) |
| | | squamosa promoter binding protein-like 12 [Arabidopsis thaliana] Length = 927 |
| 824 | 2027824 | Pkc_Phospho_Site(105-107) |
| 825 | 2027825 | Tyr_Phospho_Site(51-58) |
| 826 | 2027826 | 3E-59 >gi\|2194138 (AC002062) Similar to Arabidopsis receptor-like |
| | | protein kinase precursor (gb\|M84659). [Arabidopsis thaliana] Length = 574 |
| 827 | 2027827 | 4E-21 >pir∥KNMUHY dehydrin-like protein - Arabidopsis thaliana |
| | | >gi\|17684\|emb\|CAA45524\| (X64199) dehydrin [Arabidopsis thaliana] Length = 127 |
| 828 | 2027828 | 1E-110 >sp\|P29512\|TBB2_ARATH TUBULIN BETA-2/BETA-3 CHAIN |
| | | >gi\|320184\|pir∥JQ1587 tubulin beta chain - Arabidopsis thaliana >gi\|166898 |
| | | (M84700) beta-2 tubulin [Arabidopsis thaliana] >gi\|166900 (M84701) beta-3 tubulin |
| | | [Arabidopsis thaliana] Length = 450 |
| 829 | 2027829 | 2E-78 >sp\|O23676\|MGN_ARATH MAGO NASHI PROTEIN HOMOLOG |
| | | >gi\|2317907 (U89959) Mago Nashi-like protein [Arabidopsis thaliana] Length = |
| | | 150 |
| 830 | 2027830 | Pkc_Phospho_Site(347-349) |
| 831 | 2027831 | Tyr_Phospho_Site(322-329) |
| 832 | 2027832 | 2E-70 >dbj\|BAA05654\| (D26609) transmembrane protein [Arabidopsis |
| | | thaliana] Length = 287 |
| 833 | 2027833 | Tyr_Phospho_Site(127-133) |
| 834 | 2027834 | Tyr_Phospho_Site(936-943) |
| 835 | 2027835 | 7E-13 >emb\|CAA57523\| (X81997) leucine-rich-repeat protein [Helianthus |
| | | annuus] Length = 540 |
| 836 | 2027836 | 3′ Tyr_Phospho_Site(165-172) |
| 837 | 2027837 | 3′ 3E-36 >gi\|2829869 (AC002396) pyruvate dehydrogenase E1 alpha |
| | | subunit [Arabidopsis thaliana] Length = 393 |
| 838 | 2027838 | 5′ Tyr_Phospho_Site(117-124) |
| 839 | 2027839 | 5′ 4E-53 >gi\|1351122\|sp\|P23618\|THI4_FUSOX THIAZOLE BIOSYNTHETIC |
| | | ENZYME PRECURSOR (STRESS-INDUCIBLE PROTEIN STI35) |
| | | >gi\|280494\|pir∥B37767 stress-inducible protein sti35 - fungus (Fusarium |
| | | oxysporum) >gi\|168164 (M33643) ST135 protein [Fusarium oxysporum] |
| | | >gi\|6045153\|dbj\|BAA85305.1\| (AB033416) st |
| 840 | 2027840 | 5′ Tyr_Phospho_Site(140-148) |
| 841 | 2027841 | 5′ 2E-82 >gi\|548355\|sp\|P11832\|NIA1_ARATH NITRATE REDUCTASE 1 (NR1) |
| | | >gi\|486751\|pir∥S35228 nitrate reductase (NADH) (EC 1.6.6.1) 1 - Arabidopsis |
| | | thaliana >gi\|22757\|emb\|CAA79494\| (Z19050) nitrate reductase [Arabidopsis |
| | | thaliana] >gi\|448286\|prf∥1916406A nitrate reductase [Arabidopsis thaliana] |
| 842 | 2027842 | Tyr_Phospho_Site(847-855) |
| 843 | 2027843 | Pkc_Phospho_Site(134-136) |
| 844 | 2027844 | 2E-21 >emb\|CAB36830.1\| (AL035528) isoflavone reductase-like protein |
| | | [Arabidopsis thaliana] Length = 317 |
| 845 | 2027845 | Tyr_Phospho_Site(355-363) |
| 846 | 2027846 | Pkc_Phospho_Site(175-177) |
| 847 | 2027847 | 7E-32 >sp\|P46667\|ATH5_ARATH HOMEOBOX-LEUCINE ZIPPER PROTEIN |
| | | ATHB-5 (HD-ZIP PROTEIN ATHB-5) >gi\|629504\|pir∥S47135 homeotic protein |
| | | Athb-5 - Arabidopsis thaliana >gi\|499160\|emb\|CAA47426\| (X67033) Athb-5 |
| | | [Arabidopsis thaliana] L |
| 848 | 2027848 | 5E-59 ) >sp\|O23290\|RL44_ARATH 60S RIBOSOMAL PROTEIN L44 |
| | | >gi\|2244789\|emb\|CAB10211.1\| (Z97336) ribosomal protein [Arabidopsis thaliana] |
| | | Length = 105 |
| 849 | 2027849 | Tyr_Phospho_Site(244-251) |
| 850 | 2027850 | 8E-57 >sp\|P10896\|RCA_ARATH RIBULOSE BISPHOSPHATE |
| | | CARBOXYLASE\|OXYGENASE ACTIVASE, CHLOROPLAST PRECURSOR |
| | | (RUBISCO ACTIVASE) >gi\|81660\|pir∥S04048 ribulose-bisphosphate carboxylase |
| | | activase precursor - Arabidopsis thaliana >gi\|16471\|emb\|CAA32429\| (X14212) |
| | | rubisco activase (AA 1 - 473) [Arabidopsis thaliana] Length = 473 |
| 851 | 2027851 | Pkc_Phospho_Site(89-91) |
| 852 | 2027852 | Tyr_Phospho_Site(564-570) |
| 853 | 2027853 | Pkc_Phospho_Site(128-130) |
| 854 | 2027854 | 3′ 4E-47 >gi\|166708 (M64118) glyceraldehyde-3-phosphate |
| | | dehydrogenase [Arabidopsis thaliana] Length = 447 |
| 855 | 2027855 | 3′ 2E-21 >gi\|1171967\|sp\|P46686\|P46_MOUSE P4-6 PROTEIN |
| | | >gi\|2137635\|pir∥I48711 phosphodiesterase - mouse >gi\|467578\|emb\|CAA49481\| |
| | | (X69827) phosphodiesterase [Mus musculus] Length = 271 |
| 856 | 2027856 | 5′ 6E-69 >gi\|5231113\|gb\|AAD41076.1\|AF141202_1 (AF141202) EIN2 |
| | | [Arabidopsis thaliana] >gi\|5231115\|gb\|AAD41077.1\|AF141203_1 (AF141203) |
| | | EIN2 [Arabidopsis thaliana] Length = 1294 |
| 857 | 2027857 | 5′ 1E-18 >gi\|3928519\|dbj\|BAA34675\| (AB011670) wpk4 protein kinase [Triticum |
| | | aestivum] Length = 526 |
| 858 | 2027858 | 5′ Tyr_Phospho_Site(22-29) |
| 859 | 2027859 | 5′ Tyr_Phospho_Site(718-725) |
| 860 | 2027860 | 5′ Rgd(231-233) |
| 861 | 2027861 | 5′ Tyr_Phospho_Site(751-759) |
| 862 | 2027862 | 5′ 2E-14 >gi\|1931638 (U95973) transcription factor RUSH-1alpha |
| | | isolog [Arabidopsis thaliana] Length = 1227 |
| 863 | 2027863 | 5E-15 >emb\|CAA18500\| (AL022373) Myc-type transcription factor |
| | | [Arabidopsis thaliana] Length = 272 |
| 864 | 2027864 | 3E-73 >gi\|1707017 (U78721) RNA helicase isolog [Arabidopsis thaliana] |
| | | Length = 733 |
| 865 | 2027865 | 4E-75 >gb\|AAD15451\| (AC006068) receptor protein kinase [Arabidopsis |
| | | thaliana] Length = 567 |
| 866 | 2027866 | Tyr_Phospho_Site(119-127) |
| 867 | 2027867 | Tyr_Phospho_Site(112-118) |
| 868 | 2027868 | Pkc_Phospho_Site(63-65) |
| 869 | 2027869 | Tyr_Phospho_Site(45-53) |
| 870 | 2027870 | Tyr_Phospho_Site(88-94) |
| 871 | 2027871 | 2E-83 >sp\|P43282\|METM_LYCES S-ADENOSYLMETHIONINE |
| | | SYNTHETASE 3 (METHIONINE ADENOSYLTRANSFERASE 3) (ADOMET |
| | | SYNTHETASE 3) >gi\|1084408\|pir∥S46540 methionine adenosyltransferase (EC |
| | | 2.5.1.6) - tomato >gi\|429108\|emb\|CAA80867\| (Z24743) S-adenosyl-L-methionine |
| | | synthetase [Lycopersicon esculentum] Length = 390 |
| 872 | 2027872 | Pkc_Phospho_Site(61-63) |
| 873 | 2027873 | Tyr_Phospho_Site(67-74) |
| 874 | 2027874 | 3′ 2E-44 >gi\|3320462 (AF062467) polygalacturonase precursor |
| | | [Cucumis melo] Length = 461 |
| 875 | 2027875 | 3′ Pkc_Phospho_Site(27-29) |
| 876 | 2027876 | 3′ Pkc_Phospho_Site(9-11) |
| 877 | 2027877 | 3′ Pkc_Phospho_Site(39-41) |
| 878 | 2027878 | 5′ 1E-47 >gi\|5915830\|sp\|Q96514\|C7B7_ARATH CYTOCHROME P450 71B7 |
| | | >gi\|1523796\|emb\|CAA66458\| (X97864) cytochrome P450 [Arabidopsis thaliana] |
| | | >gi\|4850394\|gb\|AAD31064.1\|AC007357_13 (AC007357) Identical to gb\|X97864 |
| | | cytochrome P450 from Arabidopsis thaliana and is a member of the PF\|00067 |
| | | Cytochrome |
| 879 | 2027879 | 5′ 2E-17 >gi\|2262111\|gb\|AAB63619.1\| (AC002343) ribitol dehydrogenase |
| | | isolog [Arabidopsis thaliana] >gi\|5668633\|emb\|CAB51648.1\| (AL109619) protein |
| | | [Arabidopsis thaliana] Length = 332 |
| 880 | 2027880 | 5′ 4E-80 >gi\|5853117\|gb\|AAD54323.1\| (AF177200) chlorophyll a oxygenase |
| | | [Arabidopsis thaliana] Length = 536 |
| 881 | 2027881 | 2E-37 >dbj\|BAA25181\| (D88537) delta 9 desaturase [Arabidopsis thaliana] |
| | | Length = 307 |
| 882 | 2027882 | 5E-55 >gi\|3004564 (AC003673) receptor Ser/Thr protein kinase |
| | | [Arabidopsis thaliana] Length = 392 |
| 883 | 2027883 | 3E-91 >gb\|AAD31375.1\|AC006053_17 (AC006053) proton phosphatase |
| | | [Arabidopsis thaliana] Length = 392 |
| 884 | 2027884 | Tyr_Phospho_Site(363-371) |
| 885 | 2027885 | 1E-59 >gb\|AAD11598.1\|AAD11598 (AF071527) calcium channel [Arabidopsis |
| | | thaliana] >gi\|4263043\|gb\|AAD15312\| (AC005142) calcium channel [Arabidopsis |
| | | thaliana] Length = 724 |
| 886 | 2027886 | Pkc_Phospho_Site(300-302) |
| 887 | 2027887 | 1E-10 >gb\|AAD31528.1\|AF147717_1 (AF147717) ubiquitin C-terminal hydrolase |
| | | UCH37 [Homo sapiens] Length = 329 |
| 888 | 2027888 | 1E-133 >gi\|4163997 (AF087483) alpha-xylosidase precursor |
| | | [Arabidopsis thaliana] Length = 907 |
| 889 | 2027889 | 1E-82 >emb\|CAA71174\| (Y10085) desication related protein LEA14 |
| | | [Arabidopsis thaliana] >gi\|2505882\|emb\|CAA73311\| (Y12776) LEA protein |
| | | [Arabidopsis thaliana] Length = 151 |
| 890 | 2027890 | 2E-45 >gb\|AAD40132.1\|AF149413_13 (AF149413) contains similarity to |
| | | arabinosidase [Arabidopsis thaliana] Length = 521 |
| 891 | 2027891 | Pkc_Phospho_Site(150-152) |
| 892 | 2027892 | Pkc_Phospho_Site(25-27) |
| 893 | 2027893 | 2E-45 >emb\|CAA04134\| (AJ000497) Starch branching enzyme II |
| | | [Arabidopsis thaliana] >gi\|4581160\|gb\|AAD24644.1\|AC006919_22 (AC006919) |
| | | starch branching enzyme II [Arabidopsis thaliana] Length = 858 |
| 894 | 2027894 | 2E-22 >gi\|1850546 (U88045) syntaxin related protein AtVam3p |
| | | [Arabidopsis thaliana] Length = 268 |
| 895 | 2027895 | 9E-46 >gb\|AAD23667.1\|AC007070_16 (AC007070) serpin protein [Arabidopsis |
| | | thaliana] Length = 385 |
| 896 | 2027896 | Pkc_Phospho_Site(53-55) |
| 897 | 2027897 | 2E-17 >emb\|CAA16574.1\| (AL021636) synaptobrevin-like protein |
| | | [Arabidopsis thaliana] >gi\|4103357 (AF025332) vesicle-associated membrane |
| | | protein 7C; synaptobrevin 7C [Arabidopsis thaliana] Length = 219 |
| 898 | 2027898 | 2E-51 >sp\|P31414\|AVP3_ARATH PYROPHOSPHATE-ENERGIZED |
| | | VACUOLAR MEMBRANE PROTON PUMP (PYROPHOSPHATE-ENERGIZED |
| | | INORGANIC PYROPHOSPHATASE) (H+-PPASE) >gi\|282878\|pir∥A38230 |
| | | inorganic pyrophosphatase (EC 3.6.1.1), H+-translocating pyrophosphate- |
| | | energized - Arabidopsis thaliana >gi\|166634 (M81892) vacuolar H+-phosphatase |
| | | [Arabidopsis thaliana] Length = 770 |
| 899 | 2027899 | Tyr_Phospho_Site(57-64) |
| 900 | 2027900 | Pkc_Phospho_Site(32-34) |
| 901 | 2027901 | Tyr_Phospho_Site(617-623) |
| 902 | 2027902 | 3E-80 >gi\|2443887 (AC002294) Similar to transcription factor |
| | | gb\|Z46606\|1658307 and others [Arabidopsis thaliana] Length = 1272 |
| 903 | 2027903 | Tyr_Phospho_Site(581-589) |
| 904 | 2027904 | 3′ Tyr_Phospho_Site(524-532) |
| 905 | 2027905 | 3′ Tyr_Phospho_Site(751-758) |
| 906 | 2027906 | 3′ 1E-30 >gi\|2281095 (AC002333) cysteine synthase, cpACS1 |
| | | [Arabidopsis thaliana] Length = 392 |
| 907 | 2027907 | 5′ 4E-81 >gi\|1402918\|emb\|CAA66964\| (X98320) peroxidase [Arabidopsis |
| | | thaliana] >gi\|1429215\|emb\|CAA67310\| (X98774) peroxidase ATP6a [Arabidopsis |
| | | thaliana] Length = 336 |
| 908 | 2027908 | 5′ 1E-10 >gi\|4874285\|gb\|AAD31348.1\|AC007212_4 (AC007212) |
| | | phosphatidylinositol/phophatidylcholine transfer protein [Arabidopsis thaliana] |
| | | Length = 558 |
| 909 | 2027909 | 5′ 1E-22 >gi\|5903094\|gb\|AAD55652.1\|AC008017_25 (AC008017) Similar to ®- |
| | | mandelonitrile lyase isoform 1 precursor [Arabidopsis thaliana] Length = 552 |
| 910 | 2027910 | 5′ 2E-37 >gi\|4678328\|emb\|CAB41139.1\| (AL049658) aldehyde dehydrogenase |
| | | (NAD+)-like protein [Arabidopsis thaliana] Length = 538 |
| 911 | 2027911 | 5′ 4E-76 >gi\|1100253\|dbj\|BAA07012\| (D34630) acetyl-CoA carboxylase |
| | | [Arabidopsis thaliana] Length = 2254 |
| 912 | 2027912 | 1E-40 >gb\|AAD41415.1\|AC007727_4 (AC007727) Contains similarity to |
| | | gb\|U07707 epidermal growth factor receptor substrate (eps15) from Homo sapiens |
| | | and contains 2 PF\|00036 EF hand domains. ESTs gb\|T44428 and gb\|AA395440 |
| | | come from this gene. [Arabidop . . . Length = 1181 |
| 913 | 2027913 | 1E-32 >gi\|4249409 (AC006072) sugar transporter [Arabidopsis thaliana] |
| | | Length = 348 |
| 914 | 2027914 | 5E-63 ) >gb\|AAD35008.1\|AF144390_1 (AF144390) thioredoxin-like 4 [Arabidopsis |
| | | thaliana] Length = 118 |
| 915 | 2027915 | 4E-47 >gb\|AAD45605.1\|AF160729_1 (AF160729) isovaleryl-CoA-dehydrogenase |
| | | precursor [Arabidopsis thaliana] Length = 409 |
| 916 | 2027916 | 1E-43 >emb\|CAA64328\| (X94625) amp-binding protein [Brassica napus] |
| | | Length = 552 |
| 917 | 2027917 | Tyr_Phospho_Site(64-71) |
| 918 | 2027918 | 1E-14 >emb\|CAB16578\| (Z99295) phosphatidyl synthase |
| | | [Schizosaccharomyces pombe] Length = 570 |
| 919 | 2027919 | Tyr_Phospho_Site(59-66) |
| 920 | 2027920 | 8E-34 >dbj\|BAA12798\| (D85382) mitochondrial ribosomal protein S11 |
| | | (nuclear encoded) [Oryza sativa] Length = 254 |
| 921 | 2027921 | 7E-21 >sp\|P46484\|COMT_EUCGU CAFFEIC ACID 3-O- |
| | | METHYLTRANSFERASE (S-ADENOSYSL-L-METHIONINE:CAFFEIC ACID 3-O- |
| | | METHYLTRANSFERASE) (COMT) >gi\|542009\|pir∥S40146 catechol O- |
| | | methyltransferase (EC 2.1.1.6) - cider tree >gi\|437777\|emb\|CAA52814\| (X74814) |
| | | 0-Methyltransferase [Eucalyptus gunnii] Length = 366 |
| 922 | 2027922 | 5E-87 >sp\|Q42472\|DCE2_ARATH GLUTAMATE DECARBOXYLASE 2 (GAD |
| | | 2) >gi\|1184960 (U46665) glutamate decarboxylase 2 [Arabidopsis thaliana] |
| | | >gi\|1236619 (U49937) glutamate decarboxylase [Arabidopsis thaliana] Length = |
| | | 494 |
| 923 | 2027923 | 2E-63 >gi\|533707 (U12536) 3-methylcrotonyl-CoA carboxylase |
| | | precursor [Arabidopsis thaliana] Length = 715 |
| 924 | 2027924 | Pkc_Phospho_Site(107-109) |
| 925 | 2027925 | 5E-75 >gb\|AAD11594.1\|AAD11594 (AF071527) M-type thioredoxin [Arabidopsis |
| | | thaliana] >gi\|4263039\|gb\|AAD15308\| (AC005142) M-type thioredoxin [Arabidopsis |
| | | thaliana] Length = 186 |
| 926 | 2027926 | 1E-175 >gi\|3941543 (AF069497) pelota [Arabidopsis thaliana] |
| | | >gi\|4469016\|emb\|CAB38277\| (AL035602) pelota (PEL1) [Arabidopsis thaliana] |
| | | Length = 378 |
| 927 | 2027927 | Tyr_Phospho_Site(8-15) |
| 928 | 2027928 | 2E-84 >sp\|P21238\|RUBA_ARATH RUBISCO SUBUNIT BINDING-PROTEIN |
| | | ALPHA SUBUNIT PRECURSOR (60 KD CHAPERONIN ALPHA SUBUNIT) (CPN- |
| | | 60 ALPHA) >gi\|2129561\|pir∥S71235 chaperonin-60 alpha chain - Arabidopsis |
| | | thaliana >gi\|1223910 (U49357) chaperonin-60 alpha subunit [Arabidopsis thaliana] |
| | | >gi\|4510416\|gb\|AAD21502.1\| (AC006929) rubisco binding protein alpha subunit |
| | | [Arabidopsis thaliana] Length = 586 |
| 929 | 2027929 | 3′ 2E-40 >gi\|4895205\|gb\|AAD32792.1\|AC007661_29 (AC007661) alcohol |
| | | dehydrogenase [Arabidopsis thaliana] Length = 350 |
| 930 | 2027930 | 3′ Tyr_Phospho_Site(420-426) |
| 931 | 2027931 | 3′ Tyr_Phospho_Site(634-642) |
| 932 | 2027932 | 5′ Tyr_Phospho_Site(78-84) |
| 933 | 2027933 | 5′ 3E-28 >gi\|2443294\|dbj\|BAA22399\| (AB001457) motor domain of KIFC3 [Mus |
| | | musculus] Length = 157 |
| 934 | 2027934 | 5′ 8E-16 >gi\|1174470\|sp\|P46978\|STT3_MOUSE OLIGOSACCHARYL |
| | | TRANSFERASE STT3 SUBUNIT HOMOLOG (B5) (INTEGRAL MEMBRANE |
| | | PROTEIN 1) >gi\|508543 (L34260) integral membrane protein 1 [Mus musculus] |
| | | >gi\|1588285\|prf∥2208301A integral membrane protein [Mus musculus] Length = |
| | | 705 |
| 935 | 2027935 | 5′ 9E-41 >gi\|227630\|prf∥1708174A selenium binding protein [Mus musculus] |
| | | Length = 472 |
| 936 | 2027936 | 5′ 5E-18 >gi\|4454051\|emb\|CAA23048.1\| (AL035394) polygalacturonase |
| | | [Arabidopsis thaliana] Length = 444 |
| 937 | 2027937 | 5′ 2E-35 >gi\|1076675\|pir∥S46534 ubiquinol-cytochrome-c reductase (EC |
| | | 1.10.2.2) iron-sulfur protein - potato Length = 265 |
| 938 | 2027938 | 5′ Pkc_Phospho_Site(17-19) |
| 939 | 2027939 | Tyr_Phospho_Site(38-44) |
| 940 | 2027940 | Rgd(98-100) |
| 941 | 2027941 | Tyr_Phospho_Site(88-94) |
| 942 | 2027942 | 5E-85 ) >dbj\|BAA82062.1\| (AB022324) AtClpC [Arabidopsis thaliana] Length = |
| | | 952 |
| 943 | 2027943 | Tyr_Phospho_Site(663-671) |
| 944 | 2027944 | 2E-81 >pir∥A42150 P-glycoprotein atpgp1 - Arabidopsis thaliana |
| | | >gi\|3849833\|emb\|CAA43646\| (X61370) P-glycoprotein [Arabidopsis thaliana] |
| | | >gi\|4883607\|gb\|AAD31576.1\|AC006922_8 (AC006922) P-glycoprotein pgp1 |
| | | [Arabidopsis thaliana] Length = 1286 |
| 945 | 2027945 | Tyr_Phospho_Site(10-18) |
| 946 | 2027946 | Tyr_Phospho_Site(146-152) |
| 947 | 2027947 | 1E-108 >dbj\|BAA74589\| (AB021934) nicotianamine synthase [Arabidopsis |
| | | thaliana] Length = 320 |
| 948 | 2027948 | 6E-38 >emb\|CAA18104.1\| (AL022140) pectinesterase like protein |
| | | [Arabidopsis thaliana] Length = 541 |
| 949 | 2027949 | 3E-99 ) >gb\|AAD25766.1\|AC006577_2 (AC006577) Belongs to the PF\|00657 |
| | | Lipase\|Acylhydrolase with GDSL-motif family. EST gb\|R29935 comes from this |
| | | gene. [Arabidopsis thaliana] Length = 376 |
| 950 | 2027950 | 5E-78 >sp\|P49637\|RL2A_ARATH 60S RIBOSOMAL PROTEIN L27A |
| | | >gi\|2129719\|pir∥S71256 ribosomal protein L27a - Arabidopsis thaliana |
| | | >gi\|1107487\|emb\|CAA63025\| (X91959) 60S ribosomal protein L27a [Arabidopsis |
| | | thaliana] >gi\|6175150\|gb\|AAF04877.1 \|AC010796_13 (AC010796) 60S ribosomal |
| | | protein L27A [Arabidopsis thaliana] Length = 146 |
| 951 | 2027951 | Pkc_Phospho_Site(86-88) |
| 952 | 2027952 | 4E-39 >dbj\|BAA25181\| (D88537) delta 9 desaturase [Arabidopsis thaliana] |
| | | Length = 307 |
| 953 | 2027953 | Tyr_Phospho_Site(807-815) |
| 954 | 2027954 | 3′ Pkc_Phospho_Site(4-6) |
| 955 | 2027955 | 3′ 9E-15 >gi\|4322315\|gb\|AAD16010\| (AF080569) DnaJ-like 2 protein [Homo |
| | | sapiens] Length = 215 |
| 956 | 2027956 | 3′ 2E-49 >gi\|4887761\|gb\|AAD32297.1\|AC006533_21 (AC006533) indole-3- |
| | | acetate beta-glucosyltransferase [Arabidopsis thaliana] Length = 456 |
| 957 | 2027957 | 5′ Tyr_Phospho_Site(76-82) |
| 958 | 2027958 | 5′ Tyr_Phospho_Site(709-717) |
| 959 | 2027959 | 1E-57 ) >sp\|Q96330\|FLAV_ARATH FLAVONOL SYNTHASE (FLS) |
| | | >gi\|1628622 (U72631) flavonol synthase [Arabidopsis thaliana] >gi\|1805305 |
| | | (U84258) flavonol synthase [Arabidopsis thaliana] >gi\|1805307 (U84259) flavonol |
| | | synthase [Arabidopsis thaliana] >gi\|1805309 (U84260) flavonol synthase [ |
| 960 | 2027960 | Pkc_Phospho_Site(16-18) |
| 961 | 2027961 | 2E-24 >emb\|CAA74713\| (Y14333) transketolase [Arabidopsis thaliana] |
| | | Length = 739 |
| 962 | 2027962 | Tyr_Phospho_Site(1177-1183) |
| 963 | 2027963 | Pkc_Phospho_Site(43-45) |
| 964 | 2027964 | 7E-13 >gi\|1825727 (U88308) C32E8.5 gene product [Caenorhabditis |
| | | elegans] Length = 299 |
| 965 | 2027965 | 1E-96 >gi\|3747111 (AF095641) MTN3 homolog [Arabidopsis thaliana] |
| | | Length = 285 |
| 966 | 2027966 | 3′ Tyr_Phospho_Site(519-527) |
| 967 | 2027967 | 3′ 9E-22 >gi\|3914239\|sp\|O04719\|P2C2_ARATH PROTEIN PHOSPHATASE |
| | | 2C ABI2 (PP2C) >gi\|1945140\|emb\|CAA70163\| (Y08966) ABI2 protein |
| | | phosphatase 2C [Arabidopsis thaliana] >gi\|1945142\|emb\|CAA70162\| (Y08965) |
| | | ABI2 protein phosphatase 2C [Arabidopsis thaliana] >gi\|2564213\|emb\|CAA72538\| |
| | | (Y11840) ABI2 [Arab |
| 968 | 2027968 | 5′ 1E-83 >gi\|6166164\|sp\|Q96330\|FLAV_ARATH FLAVONOL SYNTHASE |
| | | (FLS) >gi\|1628622 (U72631) flavonol synthase [Arabidopsis thaliana] >gi\|1805305 |
| | | (U84258) flavonol synthase [Arabidopsis thaliana] >gi\|1805307 (U84259) flavonol |
| | | synthase [Arabidopsis thaliana] >gi\|1805309 (U84260) flavonol synthase [A |
| 969 | 2027969 | 5′ 1E-32 >gi\|5353754\|gb\|AAD42230.1\|AF159853_1 (AF159853) damage- |
| | | specific DNA binding protein 1 [Mus musculus] Length = 1140 |
| 970 | 2027970 | 5′ 4E-64 >gi\|4803836\|dbj\|BAA77516.1\| (AB026987) a dynamin-like protein |
| | | ADL3 [Arabidopsis thaliana] Length = 836 |
| 971 | 2027971 | 5′ Pkc_Phospho_Site(53-55) |
| 972 | 2027972 | 5′ Tyr_Phospho_Site(115-123) |
| 973 | 2027973 | 5′ Tyr_Phospho_Site(272-278) |
| 974 | 2027974 | 1E-81 ) >gb\|AAD24410.1\|AF036307_1 (AF036307) scarecrow-like 11 |
| | | [Arabidopsis thaliana] Length = 205 |
| 975 | 2027975 | 9E-32 >sp\|P46645\|AAT2_ARATH ASPARTATE AMINOTRANSFERASE, |
| | | CYTOPLASMIC ISOZYME 1 (TRANSAMINASE A) >gi\|693690 (U15033) |
| | | aspartate aminotransferase [Arabidopsis thaliana] Length = 405 |
| 976 | 2027976 | 7E-37 >sp\|P43333\|RU2A_ARATH U2 SMALL NUCLEAR |
| | | RIBONUCLEOPROTEIN A′ (U2 SNRNP-A′) >gi\|322619\|pir∥S30580 U2 snRNP |
| | | protein A′ - Arabidopsis thaliana >gi\|17669\|emb\|CAA48890\| (X69137) U2 small |
| | | nuclear ribonucleoprotein A′ [Arabidopsis thaliana] Length = 249 |
| 977 | 2027977 | Tyr_Phospho_Site(312-319) |
| 978 | 2027978 | 1E-109 >gi\|3193292 (AF069298) similar to ATPases associated with |
| | | various cellular activites (Pfam: AAA.hmm, score: 230.91) [Arabidopsis thaliana] |
| | | Length = 371 |
| 979 | 2027979 | 8E-46 >gi\|2829899 (AC002311) similar to ripening-induced protein, |
| | | gp\|AJ001449\|2465015 and major#latex protein, gp\|X91961\|1107495 [Arabidopsis |
| | | thaliana] Length = 160 |
| 980 | 2027980 | 1E-104 >dbj\|BAA22602\| (D43962) homeodomein containing protein 1 |
| | | [Arabidopsis thaliana] >gi\|3858938\|emb\|CAA16585.1\| (AL021636) homeodomain |
| | | containing protein 1 [Arabidopsis thaliana] Length = 383 |
| 981 | 2027981 | 2E-25 >emb\|CAB56791.1\| (AJ001443) spliceosomal protein SAP 130 |
| | | [Homo sapiens] Length = 1217 |
| 982 | 2027982 | 2E-27 >gb\|AAD31078.1\|AC007357_27 (AC007357) Contains PF\|00097 Zinc |
| | | finger (C3HC4) ring finger motif. [Arabidopsis thaliana] Length = 260 |
| 983 | 2027983 | 1E-39 >sp\|P34091\|RL6_MESCR 60S RIBOSOMAL PROTEIN L6 (YL16-LIKE) |
| | | >gi\|280374\|pir∥S28586 ribosomal protein ML16 - common ice plant |
| | | >gi\|19539\|emb\|CAA49175\| (X69378) ribosomal protein YL16 |
| | | [Mesembryanthemum crystallinum] Length = 234 |
| 984 | 2027984 | Tyr_Phospho_Site(1202-1209) |
| 985 | 2027985 | 2E-69 >gi\|3176689 (AC003671) Contains similarity to ubiquitin carboxyl- |
| | | terminal hydrolase 14 gb\|Z35927 from S. cerevisiae. [Arabidopsis thaliana] Length = |
| | | 1896 |
| 986 | 2027986 | 3E-24 >gb\|AAC95169.1\| (AC005970) subtilisin-like protease [Arabidopsis |
| | | thaliana] Length = 754 |
| 987 | 2027987 | 1E-24 >emb\|CAA23030.1\| (AL035394) potassium transport protein |
| | | [Arabidopsis thaliana] Length = 802 |
| 988 | 2027988 | Tyr_Phospho_Site(1013-1020) |
| 989 | 2027989 | 3′ Pkc_Phospho_Site(62-64) |
| 990 | 2027990 | 3′ Pkc_Phospho_Site(51-53) |
| 991 | 2027991 | 3′ Tyr_Phospho_Site(192-198) |
| 992 | 2027992 | 3′ 1E-21 >gi\|584794\|sp\|Q08435\|PMA1_NICPL PLASMA MEMBRANE ATPASE |
| | | 1 (PROTON PUMP) >gi\|282953\|pir∥A41779 H+-transporting ATPase (EC |
| | | 3.6.1.35) - curled-leaved tobacco >gi\|170289 (M80489) plasma membrane H+ |
| | | ATPase [Nicotiana plumbaginifolia] Length = 957 |
| 993 | 2027993 | 3′ Pkc_Phospho_Site(120-122) |
| 994 | 2027994 | 5′ 4E-67 >gi\|6007456\|gb\|AAF00924.1\|AF188162_1 (AF188162) beta tubulin |
| | | [Stylonychia mytilus] Length = 442 |
| 995 | 2027995 | 5′ 4E-52 >gi\|2959730\|emb\|CAA73999\| (Y13648) homologous to GATA-binding |
| | | transcription factors [Arabidopsis thaliana] Length = 274 |
| 996 | 2027996 | 5′ Tyr_Phospho_Site(333-340) |
| 997 | 2027997 | 5′ Tyr_Phospho_Site(492-499) |
| 998 | 2027998 | 5′ Pkc_Phospho_Site(148-150) |
| 999 | 2027999 | 5′ Tyr_Phospho_Site(576-582) |

The application's sequence listing, which the Patent Office published only in electronic form, follows.

SEQUENCE LISTING (999 sequences)

SEQ ID NO: 1 - DNA, 478 bp, Arabidopsis thaliana
aagcttgatatcgaattcgcggccgcatacttgcatggtacgtcacaacaaggacttgatccatatctaatacacaaaatcgagtaaaaatcattcttcatcaccgcgatttccattgacacgggctcccgaaaccatttcggattcggacattactctctcgtacttaacagaacgagaagggagaatcctaaaccgtccaaaggataaagcttgtgaaagcttgtcatagtcccatctctgctgaacaaacacaatgacagcaagtagaatcgcggtaacaggtatggcgatatctccaaacttagagaagaagtcgaaattcggattaacaaactcatgttcttctccaatgaagtaaggatcaggaacagagccaacgatgtagtcataggcatgcgggaaaagtctgacaagtgtgatcccgaagtaatatagcttccttagtggctgccgggaatcaatctgccacatagca

SEQ ID NO: 2 - DNA, 478 bp, Arabidopsis thaliana
ccacgcgtccgagaatcggaacggacgaagaaggaagacaaggaagaagatcggagatggcatcgaatgcggcggttccgttctggagagcggcggggatgacatatatatcgtattcaaacatctgtgcgaatatcgtgaggaactgtctcaaggagccacacaaagctgaagctcttactcgcgagaaggttcacttctctctctccaaatgggctgatggaaagccccagaaacctgttttgcggtcagacacacctgaagtttgaagtcaactttgagcttatgttcttaagggattcaaaagtaactgtgttaccaagatttgttttctttttattgtcaacaatggagcttgagtgaaaaactcatttccgatcataataatgacacactgagtcttgtgtatctcttttcttcttttgctattctgtttcactttttgtatgcgaacaatgaaaaaaagcctttaaagaaa

SEQ ID NO: 3 - DNA, 478 bp, Arabidopsis thaliana
tcgagcggccgcccgggcaggtcagaagtgtgacaagacgattctggattctggatacagctggaagagaattaaaagaaaaagaaaaacacttccaacgaagaagatcgatttgcttcgagtctctgaaagaagaagaaaaaataatggggcgtatggattatctagcgatgaagaccgacgacgtcgatacggtggcgttagtcaattccgatatggaagagctcaaggtcgctgcgaagaaactgtttagcgatgtttcgaagcttggtggattaggcttcggtgtttcttttctcaaattcctcgcttctttcgctgccatttacttgttaattttggatcgtaccaattggaaaaccaagatgcttacatcactcctaataccatacatcttccttagccttcctagtgtcattttcaactttctcagtggagatgttgggaaatggattgctttcgttgcggttgttctcag

SEQ ID NO: 4 - DNA, 478 bp, Arabidopsis thaliana
tcgagcggccgcccgggcaggtgataaacactacacgagacacttcggattacctgtggtacatgactgatgttaaagttgatgccaatgaaggatttttgaggaatggagatttgccaactcttactgttctatcagctggccatgctatgcatgtgttcatcaatggccaattatctggatctgcgtatggtagtttagactctcctaaactaacttttcggaaaggtgtgaatctaagagctggtttcaacaaaattgcgatactaagcatcgctgttggtctcccaaatgtgggtccacattttgagacatggaatgctggagttttgggtccagtttcattgaatggtctcaatgggggacgaaaagatctatcatggcagaaatggacttataaggttggtcttaaaggagagtctctgagccttcattcacttagtgggagctcatcggttgagtgggcagaaggtgcatt

SEQ ID NO: 5 - DNA, 478 bp, Arabidopsis thaliana
ctttttttttttttttttttttttggtctcaaagataatgaatttatactatggaccttaaatgatcagcaaataaaaggtgaaatggaaatgatcaatgtgaatagttttagcatttggtaagaatctctgaaccagttctagtaatcagaatggtatgctcaaactgagcagcgacgccaccatctgctgtcagagtagtccagttgtctggccatgttacacattctgtggttccaatcgtgagaatcggttcaattgtgaatgtctgtccctcaaccattagtccaggctcatcatttcggtaatgatatataagaggttcggagtggaatactggtccaacaccatgcccaacaaaccgctccacaacgttgtagccgaacttttccgcatgctcactgattcttttcccgattttcttgaagcttgctccgtctttacaaactgcaatacctctctccaaacattcttccgt

SEQ ID NO: 6 - DNA, 478 bp, Arabidopsis thaliana
cggccgcccttttttttttttttttcctgaaaacagcaaagtttttcttgtctctttaaagcattacagccaatacacatataagagagtattacttttttctcttcctttctataaatggcaaaacaaaagcaggaaggagaagaactaggaggaacaagaaagcatgcagacgcctggcctgtaagcccaggcaggaggcaaccgagcatatttctccatccccggctgttcctcataaggacgtttcattagacggatcaaattgttgacttctgagaaatcgccttgttcagctgcatctattgcactttggcacagatagttcctcagaatgtactttgggttcactgaatccattcttgcttttctttcttcatctgatacctcactaccacccacctcttgtatatagcttctcatccatttgatccatgcttcttttctctcctttccgatgtccaagagcacagctttc

SEQ ID NO: 7 - DNA, 478 bp, Arabidopsis thaliana
  misc_feature (1)...(478): n = A,T,C or G
ctagagcggccgcccttttttttttttttttttttttttttaatttacaaaaatatttattggaggtcacaatgttcatagtaccatgcgnnnnnnaggactcattctcatcatcaacctctctgtttgttcatcttatactgcaaattttacaaatctccaaaaccagaaccaaaaccttagccaaagcattgtaaaggcaaacacgagaacagagacttttcagtttcaacaaaccaacgacgacttctttcttacacagaccaaaaaccaaaatatcaacttattctcacttctccacttgcgtgtacttcctttacagtcttatcgtattcatcctcatcgtcttcctcttcttccacctcctcctcttcctcctccacgtcttctgcatcttcctcttttccatctgcatccccatttcctccccagccaaaacctccgatggatcgggaaacaggaggcggtgttttggcgt

SEQ ID NO: 8 - DNA, 478 bp, Arabidopsis thaliana
  misc_feature (1)...(478): n = A,T,C or G
gcggccgccgaccacaaaacaaagagagagttggttccttgttcatgactttcaaatgtgnnngttttcttattcttcttgccgatttggcgtgatttcttcacctaatttggaatatagttatggtgatgcaatatttgcatgttngatcttttgttcggtaaaaaggcaaatcctttggacataccaaagtgtcaaactatatgatgaaaccattcttctttccctctatatttgtcacttgatgatctgtactattgaattgatacagagttaccaccaagaattagatgatgtgtgtatattgacgtctatataaaaatcagaagttgttttggcatctaacctttaaatttgtgaactctctgaccaaatgtaaataaaaagaattgatttnnntggtttggttcggtttggccttacacacggaaactaattggacccgaataaaccgaaattgaacaaaaccctaaattat

SEQ ID NO: 9 - DNA, 478 bp, Arabidopsis thaliana
  misc_feature (1)...(478): n = A,T,C or G
agataagtctctctcaagccgcagaaatgggagtgattgttcatcataaagatgcaagaaagagcggtttctttgttggaacttgaccatgcgtccaagttcaaagcaatctctctcagtatgttgtagatgtgacctgtgagaagctcttcttgatactttgcgttcttccatcccaaatcaatttcgaggaccttcgacaagattggcttgttgttgttccccagtagcttgttgcagtactcagtcacaacgcttacaagctttgggacacctccatcaagaggtgggcaatttggtctctgtagctctacctgacaaggtaactcccagaagatctnngagacacccttaacgagattgctgattagctcccgtgtaactctgcgtatctctgaacattgttcccctcgaaatagcctgttaaactctatccgaaagttgtccattgtagagaaacaatctaagagcttgatca

SEQ ID NO: 10 - DNA, 478 bp, Arabidopsis thaliana
aggcaaaataaaatcatatgaagagcagttggctgaagcatctggcaaatcttcttctttgaaagaaaaacttgaacagactttgggaaggcttgcagctgcagaatctgttaatgaaaaactcaaacaagagtttgatcaggcacaagaaaaatctttgcaatcatcatcagagagtgaactactagcagagacaaacaaccaactcaagatcaaaattcaagagcttgaggggttaataggttctggttctgtcgagaaagaaactgcattgaaaaggttagaagaggcaatcgaaaggtttaatcagaaagaaacagaatctagtgacttggttgaaaagttaaaaacacatgaaaaccaaatcgaggagtacaaaaagctggctcatgaagcatcaggagttgcggacactagaaaagttgagcttgaagacgcgctatcaaagttgaagaatcttgaatctactattgaagag

SEQ ID NO: 11 - DNA, 478 bp, Arabidopsis thaliana
gatgatagtaaacggagctggagactctagttttatgtccttgaccttcttttccactgagtgcaccagttcgagtccatgcttccgcacccatcacgcacaagtttctcagatccagagtagcaacactttgctttaacgttttaagatgtttgataatacgttgtggttgcatctgctgtctgagggtaataagactgatgcactgcattccaatctcctgttgcagaatatgcctggtttgcagcattacaatcagttgtcccaggagcccttggtacagaaccttgcgtcacaccttgttgactgtatacaacagcgtgagcatggtattgcggcatgtagccaacagcttgagcatgtggttgcattgtgtattcaacagcttgagcatgtggttgcaaagcatacccagttgcggcagcatggggttgctgagcgtacccggtagctgcagcatggagttgcagagcatacc

SEQ ID NO: 12 - DNA, 478 bp, Arabidopsis thaliana
atacaaaaaaagtttctcccaatgttcgacagaagagatttaaacccaaagttttttaagcgcggagattttggcatcctttcatgctttttcttttcttaaaccctgtggaaaactctctcttactttagaccttaagcttttgtcacatatcagttcttttatatcctcttgagaaaagaaaccccctaaactgaatttttaacatggaggatcataattcagggattccagtagatcttgaggagtattctgttaccaatttcaagaacatcgatgatttgtcttctaatagccgtgcaggagtatcaaactctgctactctaccgtcgctgagaaccaaaactaggtcactgtctataacagttggtatccggtgagcaatggtgcagaccgtgcagtcttcaaactctgttctgattatcttctggatcagattgtctgttgctgtgtcaaccgatgctgttgcttcatcaag

SEQ ID NO: 13 - DNA, 478 bp, Arabidopsis thaliana
tcgaagaaactcgattcttgtggattcgatttcattaaggaattttgaattgttgcctgtgatgggtggtttggctatggaggaaatgcctttatcggtgctattcgagcaagctaggaaaattcatcttgctgcttcagagtctggtgttgatcaggatgttgtgaagaaaggatgtgagatgtttcagaagtgcgaagatatgatcgggaagctggcgctgttttcgtctaacgagactaaagaagatattagcaccaacaatctcaaatatcttttggtgccttattatcttgcggagttgacagagaaaatcatacaggaggaccggattcagattgtcaaagcctcgtatgctaagttgaaggagttcttttcgttctgtgaggcaatggagcttgttccggatgaggagttggaggcttcttcacgaggaggttctggtgcacctgctgatcgaagggctctcaagatagct

SEQ ID NO: 14 - DNA, 478 bp, Arabidopsis thaliana
caaaaatatattaacatagaacgtgtgagtagagagagaatataaattaccgtacttattgggttcggtttgatggctccagcaagtccacgagtggtggtgaaggtggatttgaagaagaggccatggcagcagactcagccactgcacaatagatggcatcctgagataccatcagttgcagaggtcaagactggtgagttgtttagggtggaaatggttgactggacgggaggtgcagtcaaagaagatggctctgctggcgatattaagagcatagacctctctactgttcattacctgagtgggccgatcaaagttgtggatgaggatggtgttgcagctaggccaggtgatcttcttgctgttgagatatgcaacttgggtcctcttccaggagatgaatggggattcactgcttcatttgatagagagaatggcggtggtttcttgactgaccatttcccttgtgcgacca

SEQ ID NO: 15 - DNA, 477 bp, Arabidopsis thaliana
cttttttttttttttttgattctaagccctattaatattcccaaatgagaggataagttaaataagtcagatgcagtcaatacatcttcaacattgggtttgttatattagatattaaaagttttacaacttaatattagatgaaatgaactacacatcttcattgtcttttggcacttctatgttgctctcttcggcgaccaatgaattcgactcaacacaagttccttcaacagtagcaacagttgtaccatcggattcaccgtcaagcctgtctgatggattctcggcatctttttcctccgtcttcgggagggatgaatttgaatctgtgtcttcagtaacaacggtttctaagtgaacgtccatacctcccactgcatctggggatggcggaaatttaacttcaggttgtgatgaacatccgggagagacatcaactaactcacattcggcagtttcaatgtgatctttctc

SEQ ID NO: 16 - DNA, 477 bp, Arabidopsis thaliana
ttacaatatccctcactctacttgtaaagcttcaatcttcttcacttctcaacaaacagataaacaaaaagcttcaatctttgatactttctcgatggaacttatccccaatcttcccgacgacgttgctcgcgagtgtctccttcgctcctcctaccaacagttccctgtcatcgcctccgtttgcagagcctggaaccgtgaagtctctctctctcagtttttacatcagcgaaaagcttcacgccatagccaagagcttcttattctgtctcaggctcgtgtcgaccccgctggatccggaaagatcatcgctacgcctgaataccggatctctgttctcgaatccgggtcgggtctttggacggagcttcctccgattcctggtcaaaccaaaggacttcctctgttctgcagattggtttccgttggatccgatcttattgtcttgggtgggcttgacccgattacgtggca

SEQ ID NO: 17 - DNA, 477 bp, Arabidopsis thaliana
ggaggatcatcgggtattggttatggtttgaagtatcaggccagatgtatatcggatgttaaagcagatagagatcacactagcttcctcactggaaccctaagcttgaaagaagaaaatgaggttcatttgcttcgtttgtcttctggtggatctgagctgttatgtgagggattgttctcgcatcctaatgaaatttgggaccttgcttcttccccttttgatcaacgcattttctctactgtcttctccactggcgactcatatggagcagcaatatggcagattcctgagccatatggtcaatcgaattcttcaacattggaatgtgttgcttcccttgatgcacatgttggtaagattaattgcgttctttggtgtccctctggaaattctgacaagttaatcagcatggatgaacaaaatcttgtcttctggagtttagactcttcaaagaaaagtgcggaggttttatct

SEQ ID NO: 18 - DNA, 477 bp, Arabidopsis thaliana
ttttcttcaatctggttttttttttttgtttcatagaggagaaaggttgtggatttctcaggtggggatttgagaattagggttttctgattgggggttttcttattgatgttaccttcaccaaattgttgtcggagatctagatttggttcagttatggaataatggctcgtctcttgccatctctattcgtaattagcatcttcttcttcatccaaagactcctcctttcttcgttaatccatcgccagctattgaatctgaagcaaatctgagaatctaccgaactcacgcacctgtatattgcttacacgatacagagcacacggagacggagtacatattgttcagcgcaagtgaaagcaagagcctttttgtctattgatgggtgaggagttagctgacacaatgaacctggatttgaatcttgggcctggtcctgagtctgatctccaacctgcaccaaacgagactgtg

SEQ ID NO: 19 - DNA, 477 bp, Arabidopsis thaliana
ccacgcgtccggaactgtgaaaccaaaataataaaaaaaatgatgatgatgataattctcttgtggtcaataattttcatgaccattctcttcttaaaaaaacagttgagtgggaagaaaggtaagacacctccgtcaccaccgggacttccgttgatcggaaaccttcatcagctcggccgccacactcaccgatcactatgcgatctcagtcgccgttacggtcctctcatgctccttcacttaggtcgtgtccccgttcttatagtctcttccgcggacatggctcaagaaatcttgaagacgcacgaccaagctttcgcaaaccgcccacggtcaaaactctcccagaagcttctttacaacaatcgtgatgtggcctcagctccttatggagagtattggaggcaaatgaagtccgtgtgcgtcattcatctcttaagcaacaaaatggtacgatcttttcgagatgtaaga

SEQ ID NO: 20 - DNA, 477 bp, Arabidopsis thaliana
attcgagctcggtacctcgagcggccgcccgggcaggtacttacccacattttacaatgataggtcagagtcttggttcggtttacttagcgtgggaagcattacgcatgttcactcctttgtatttccttgacactagtggatatgcgtttacatatcctcttgctcggatctttggttgcaaagttgtttgctatactcattatccaactattagtttggatatgatttctcgtgttcgtcagaggaactctatgtataacaatgatgcttccattgctaagaggttttggttatctccttgcttatttggtgtttttcaaaagtgaaaagtttctatttctttgtttagtgtaatgatgtttgttgctttttttgtgtagcaattggttatctacttgcaaattagtctattacagagcttttagctggatgtatgggatggttgggtcatgtacctcggccgcgaccggcgcg

SEQ ID NO: 21 - DNA, 477 bp, Arabidopsis thaliana
gcggccgcctgaaacagattctaaatttatctccggtgagaaagagatagagagcgttgattccggcgaaaagatgtctgaattcgaagatcacgagggaaacggtacggttgctgacgcgatttacgacgaagagaatggtggccgcgacggcgaaatcgaggatcaattggactcgaaacccaagagagaatcgcgtgaccatgaaagagagacatcaagaagtaaagatagagaaagagagaagggtcgtgataaggacagagaaagagactctgaagtctctcgccgaagcagggatagagatggagagaaaagcaaggagaggagtagagacaaagacagagatcatcgtgagcgtcatcacagaagtagtcgtcacagggatcatagcagggagcgtggtgaaagaagagaacgtggtggtagggatgatgatgattaccgtcgaagccgtgatcgtgaccatgataggcg

SEQ ID NO: 22 - DNA, 477 bp, Arabidopsis thaliana
cgacagccactctagtgtgtcgacgaaagtaactctcaaaaatctcttgccatccgctaaagctgtaattagtttcaaaatacctgatcacaagtctggcaagctggatgtgcaatatgttcatcctcatgctacgctcaattccagcattggcctcaacccaactcctctgttagatctatcagcaactatcggaagccagaatgtttgccttggtggtgaagtcagtttcgacacagcttcatcatcactaacaaagtacaatgcagggattggtttcaacaaccaaggcgtctctgctgcactcatactggaggataaaggggagagtctgagagctacttacgtccacacagtgaacccaaccacatcctttggtgcagaactgatccgtcgcttctccaattataacaacagcttcaccgtcggaagctctcactctgtggatcaattcacagtggttaagaccagattttc

SEQ ID NO: 23 - DNA, 477 bp, Arabidopsis thaliana
ccacgcgtccggatggagcagatcaagaattttttggagaaaatgcctaatcttgaacaactcataatatactacgaatcatcaatcgataatgatttagttagagtatcaagccaacttcaggaggttcctacagtagcttcactcaagtgcaagattcaagtaatctctgataaccttagcttgtcatccactttgcccatttccttgtcgatggaaaatggatttcacctgtagaagaaccttactggtttcgtggaattagtaatgcggtcatgcctcgattaccacttggaagctatatatggatgtgctcatggctacaagtatttgtagttactaaaattatcttaaaaactcaaatcaagattctcttgtttctgttgtttgtactttgttactaattgaaaaactctttatgctttggaagctatatttggatgtgtctcctggctaaaaaaaaaaaaaaaaaaaaag

SEQ ID NO: 24 - DNA, 477 bp, Arabidopsis thaliana
aatcgccgccactctctcggtttcaatggctgatctcgatgttcctcctcaagttcctcaaagtaaaactagagaccttgacaagcttcttctccgtcatgggaatctcgttgaccccggcttcgtacccggacccggcctgagggatgacataagggattatgtgagaatcttggtgattggtgcgggtgggttgggttgtgagcttctcaaggatttagctctttctggttttcgtaatctcgaagtgattgatatggaccgtattgaggttactaatctcaatcgccagttcctgttcaggattgaagatgtaggaaagcctaaggcagaggtagcagcaaagcgtgtaatggagagagtgagtggagtagagattgtgccgcattttttacgtatagaagacaaagagattgagttttataacgattttaatatcattgctcttggtcttgattctatcgaagctcgcaaata

SEQ ID NO: 25 - DNA, 477 bp, Arabidopsis thaliana
aaagagccgaatttctggcaagaacctgagaaagcgataaagaaagcttactatataacggatacaacgattctagacaaggcagatgatttgggaaaaggaggttctactgctgtgactgcgatattgatcaattgccagaagctggtggttgctaatgttggtgactctcgagctgttatttgccaaaatggtgttgcgaagccactctcagttgatcatgagccgaacatggagaaggatgaaatcgagaacagaggaggattcgtttctaactttcctggggatgttcctcgagttgatggtcaactggctgtggcaagggcatttggtgataagagtttaaagatgcatttgagttcagaaccatatgttacggtggagatagttgatgatgatgcagaatttcttatcctagcaagtgatggactatggaaggtcatgtcaaaccaagaagccgttgactcaatcaaggga

SEQ ID NO: 26 - DNA, 477 bp, Arabidopsis thaliana
ctaagcgctgaatttgatcaatctctgttctctttttccttcatttgattcccttttctgggtctctctaatttattggcgtcgttgtttccttatcctgaatccttatcttcaatcctctgttctgtttctcaaacctaaaaaagtttgaaactttcctgaaaaaatggcgactagaggaagcagatcggagaaagttaagagaattttccagcaattcgacgggaatcatgatggtgggcttaaccgtgaagagatggcggctcttgtcgtagctgttaaccctagggttaaattcagtgacgagcagatcaacgccattctcgatgaagtttttcgaacttacgctgaattcatcgatccaaacaagggtttgacctacgacggtctcctacgtacttacgacgacggtgccggagatgttgacagagatttcgacgcttggggcttgagtaaacgctgatgagacgacgatta

SEQ ID NO: 27 - DNA, 477 bp, Arabidopsis thaliana
tttttttttttttttttgttataatttgcaactaattaaaaacttcaaacatacgtaacacaaactctgcaatacttgcagttcagatctcttcatagagagagcacattattgaaaatttgagatatcttacaaaacacccacaaacatagatagatagatagatagatggatatccaaggaatcctctagacttcggacaaaagcatttcgtccattgattcggttagcttggcaaacaactcgagcagcttctccggaggagccaccttctcgtcaatcctctcatattttaagtgacacttaaccacacttcccggtcctcttagctttggggttgcctggatagtgaccaagaagctcttgaactctttcgtcagatctccatctattaccctgagcactaacagattcttctcctgatccactgcctcgatcctctccctcgccaccttgggctgcccatcaatcggacgc

SEQ ID NO: 28 - DNA, 477 bp, Arabidopsis thaliana
cggccgcggcataataaagtatttgataaacgttcaataacaatggcttaaaatgagtttcaagcgtatataatccataataactggatcaaatagatatacaaacacataaactgataaacgcaaagtcctcgcaagtacctcttcatttccacacaaaggcaacacacttgcttagcacacaccattcatcttcttcctctccttcacaaacttcctccatccaacaataacttccatcagaatctccttctccatcttcttctcctttacattttccgcgatcccttctattcccatcttcttagatatcttggaaggcaaggtatctagctcatgaagcaccttcgaaatatcagcaacaagtctctccgcgagtgttcttgagaaatcttccctgatgacaacacgcagaaccgtgatgtgctgtgcatcggcaggcatagtgtaagctgggacgatccagccaaaacgacg

SEQ ID NO: 29 - DNA, 477 bp, Arabidopsis thaliana
tgagagatgttttagaaacatgtacaaaggtacagaaggggtaacaccgaatatcagctagaaagaagcaacaaatcaattcacaaacgagacatacatatagacataacatatacttcaccaaattcatattttgtcatcagccatttcctggtgttctaacaccaacaaatctgatgataagtaaagccttagaaacgccgcacacttgtgaaattcaacaactttttgccatcctcaacattcacggcgataatcacggccatagctgtagtttggcctagctccgaaatcactctcagacctctctgcagcagctctctcttcctctaagctcaatccacccatcgtcttctgcaactgcctgtgatcataaggagagtaatcgactggtgccgatggaccattaggcactccgtagctagacaatcgcgagcccataggtggagcttgtggcttgtactcggtaaccagaaa

SEQ ID NO: 30 - DNA, 477 bp, Arabidopsis thaliana
  misc_feature (1)...(477): n = A,T,C or G
ttttttgaatccaaaagtagtagacattgaagaagataaacccgagttactggaataagttgtgaaacaagtactacaaaagagcttgaagggaagagacacaaacaaagaacaaagagtgtttcggagtttttgatttcggagttcttctatctgtctcaatctctctaattgtagaccatatacttgggagtggcactgaacttttggtaanntttaatgactttgttcactgcgtctagaaagtctttctcagtcacagtctttctcctagctctgattgcgtacattcctgcttcagtgcatacacttcgaatatcagctcccgttgagtttgggcagaggcgagcaaggagttcgaaacggatgtctctttcgcagttcatggttcttgtgtgaatcttgaagatctgtgttctgctctccaggtcaggtagaccaaactcaaccttacggtcaagacgtccaggacgtaaa

SEQ ID NO: 31 - DNA, 477 bp, Arabidopsis thaliana
gcggccgccacagaacaagcatatacttacagagtttcttcttattctactctcttcctccaccacctccttgcatgttcactagtctcgttcttggtaatgaactaaggagtcaagtttcagttgaagctgttgagacagaggaagaagttgaagatgaagatgaagataatagttctcttcctttactactgttacattggttctacttcctctgttttagcttccatcgacaatgtcaacgagctctctgttttgctgtcggtgaaatcaactcttgtggatcctctcaactttctcaaagactggaagctttcagacaccagcgatcactgtaattggaccggtgttcggtgcaactcaaatggcaatgttgagaagctcgacctggcggggatgaatctcacaggcaaaatctcagattcgatcagccagctgagtagccttgtctcgtttaacatatcatgcaacggattc

SEQ ID NO: 32 - DNA, 477 bp, Arabidopsis thaliana
aaacaaatctaattatgagattctcggtgaaaataaaacaccacaaaacaagaatctccaaagcaaatctgataacattacatacaaagctgagtttttgacttattcgcaagcaagttttgtgtcgaaactgctcaaacagatagcgaaagcctgaaacgcagagagcggataccggaaatccatcgtgaacatgtcttttcccactttcccaaactgcaatatgatcttgtcgggaccatcggtctgaccagacggttgcggctgagttaggggttgaggttgcggttgaggctgaggctgaggctgtggttggtttgctgcaatgagctgaaagttcttaactgatgcgactgttacacgtcccctgaagtttaaacaccaacactgaagctgttcatgccacctcggcggcttgttcttaagcacaagtggtggcgaattccgctctttcccttcttctaataccacttcttg

SEQ ID NO: 33 - DNA, 477 bp, Arabidopsis thaliana
tggaagcagcggagccatgaaacccaaatacaacgtccctcaccctcacttggtgacaatccacctacagtttcggctgaagcaaggtcgtctttctccactggacaatccatgggcaaactgaaatctgatgtaattattgcgaaggagagaagtacctccaatcatggagtttctgccctgacaactgcagaaagctcgagcagcagtacaacaggaggaactttgatgggggtgatgagaggttcttttggaggaactttgggtggagcttcttcttcagctagtgtacaaatgccgccaatattaccttctgcttctccagcttcggtttcagtttctgggagtgggagaagaaggttctctgaaacaccgactgcagggcctactcatagagaacagcctcagacatcataccgggaccgtgctgcagaaagaagaaacttgtatggctcatcaacatcaagtggaaatgat

SEQ ID NO: 34 - DNA, 477 bp, Arabidopsis thaliana
tcgcggccgctttccaggttacttgttcagaaagaaaggtggatacatggttattatgaagaagaaaaacacattctggttattgtacaaattgtatcagccaacggtgcctttctgaggtagagtctcgaaagcagacacggtattctcaaacctgacacgtggcagcggtgcgccgctctgtttgatggcacatgccgttttgtcttctagaggacaacgagctttaagcatggagaagacatggttgttcagcctccgagctttcttcatcccttccaacaaaccttcccatccctgatggatttgtggattcctatgggtatgtgaagcagagacagtttcaacctcagagacattgagtacttggtacgagaaatcaaacaactcaaagtgaagttgctggccgagcaagtaaataatggtgcaaccaccccaagctattgaatcaccgaggacttcatgttgagctgactg

SEQ ID NO: 35 - DNA, 477 bp, Arabidopsis thaliana
cgaagagcatagttaatcccagaagccttaagaaaccgacttctgtgaagaagattcagctgactccatgggatctctctcgccttcgttttggttatcttcaaagaggtcttctctttcacaaaattgaagtcaaacaattacaagcttcactctctgttgcacttgatcgtttctatccattagctggtcgtcttgtgaagctaaagaacgacgacgatactgtctcgtttttcatcagctgcgatggttcaggtgtggagtttgttcacgcagtggctaaaaacatcgagctcagtgatgtccttgagttatccggttctgtccccgggtttttcgcttcctttttccctgcaacggggatcaagaactaccacggtgtctcaagatctctacttatggttcaagtgacagagatgaaggacggggttttcatcggttttggttacaactctaccgtggctgatgccacttcaa

SEQ ID NO: 36 - DNA, 476 bp, Arabidopsis thaliana
atggatgcaacttaaacaaattgttagaagaaataagtatttcgcgattcattacaagattttcaagactaggtaatgttaaaatcttaagattgcatcaaagacaaagaaggaactcaaagaagctttattaacaccatatggttatatgtatgtacacacatactagagagtagtagaccctctggctcacacaccgtttcaatgcgccgggtgagggtaaacggtgtgagtgcggtgagcttgaaggatacaagcacaatgaacagattgtagattcaaacaaccgctcatgacaagtgaatgtctgcctgaacaagtgtggagagcagggaatgtatcacagacagcttgaacagctgaaggtgttaggtaagtgcattgactaatgttaaggcttcttagtccttcttcatcgaattttcctttctttaccgctcgccacatctcgtgtttgttcttgactccgctctgag

SEQ ID NO: 37 - DNA, 476 bp, Arabidopsis thaliana
gcggccgcccgggcaggtacatggcgacgttaagccttccaacattcttcttgattcctccttcactccttacatctctgacttcggtctcacacgtctcatcaccatcactgccgcttctgcctcttctaacgaaccttcctcctcctctgctgcgggtggtttcttaggtggagctcttccttacacttccatcaaaccctcagatagatccaacggctataaagcccccgaggcccggctccctggagggaggcctactcagaaatgggacgtatactccttcggtgttgtgcttatggagcttctcaccgggaaatcgccggattcttctccgttaagctcttcctcgacgtctacggtggttgttgaggtgccggatttggtgaagtgggtgaggaaagggtttgaagaggagactccattgtcggacatggttgatccaatgttacttcaagaagttcacgccaagcaac

SEQ ID NO: 38 - DNA, 476 bp, Arabidopsis thaliana
  misc_feature (1)...(476): n = A,T,C or G
agaggcattctctgattcagtttgttgtagtgtttgataacacgatgaacagttnctggaacgtactcaagaacaagattgaggtaaagctcatctttttcagtggttgagaagaaacaatgtttcagagacacaacattaggatggtcaagtagcctcatggtttgaagctcacggttcttgtacctcctatcttgtaaaactttctttatcgcaacagtttctcctgtctcaagacatttcgcttggaacacaacaccaaaagatccgtgaccaacaacacgctcagccatgtagctaattgtctgttttggttggccatttctaccaccaatagtagtcacaatgatatgtccagtctctgttccatttccatctaccactgtcgcttccatttctttatcgtcacgaattttcatgtcattcatttcttcaggcaatttatcaacaccagtagagtctcttgctccaggatt

SEQ ID NO: 39 - DNA, 476 bp, Arabidopsis thaliana
  misc_feature (1)...(476): n = A,T,C or G
gcgacacggtgattctcaatctcgttggtcaagacgtcaccgatgctttcatcgcatttcatcccggaaccgcttggcaccatctcgaccatctcttcaccggttaccacatcagagatttccaagtctccgaagtctcacgcgattaccgtcgtatggctgccgagtttcgtaaactcggtctcttcgaaaacaaaggtcacgttactctctacactctagccttcgtcgccgccatgttcctcggagttctctacggtgttttggcttgtacctccgtcttcgctcaccaaatcgccgccgcgcttctcggtctcctctggatccagagcgcttacataggtcacgattctggtcattacgttatcatgtcgaacaaatcttataacagattcgctcagcttctctnnggtaactgtctcaccggaatctcaatcgcgtggtggaaatggactcacaatgctcatcatctagct

SEQ ID NO: 40 - DNA, 476 bp, Arabidopsis thaliana
ctttttttttttttttgatgcgttttaaataaccatatatctcaaaaaaacggaatacgaaacaaaagattctaacaagttcctgaagaatcaaacaacaagagataagaaaaagaagccaaacatcttaggtggataaagaaaccaaacatcttaggtgttggtggcacgagtgtagatctgctggctcgagtgagcagcgaccatcctgatcacacctttggccattagctccctaatcgctctccttgctagcgacccattgatcctcatacggtcagagagaatggaaggggtgatgagcttgaacttgggagcttcagtgagaagcttgtcataagtagcttgatcaaacagcaccatgttgttcaccttctccttttgctttcccttgctccacttcttcttcttctgctttccacctccggatttcgccggcttcgatgacggtggcggaaccttatccttcttcggcg

SEQ ID NO: 41 - DNA, 476 bp, Arabidopsis thaliana
tcctttgactttagccatttgttcaccgcctttaaagacgagagtggtcgggagataacttatgtcaaaacgttctgtgagccttatctctgtgtcaaagtttactgtgtagaatttgaactcattcttgtattccgagtccattttgttcagtatggggatcatgtcacgacacggtccgcaccaccgggctgtgaacataaccattactgggagttccgattggatcacaagtgattcccattctgattcagtgatactgtgtacttcatccttaagcttacgagaatagaccaaaccatcattagacttagatggtagtgatgatgagacgtaagtcttgatcaagggatcgaactctgaacacatcccaccactaaaacctaaacataccaagcatgtcaccgtcaataccaaacggtacaaaacgctaatttgctccattgatactttgtgacctgcccgggcggccgctc

SEQ ID NO: 42 - DNA, 476 bp, Arabidopsis thaliana
atatcgagaaggctaagatcttacgtgagaaggtcaaatggtgttaccgcgtcgaaggcgttaaccattaccagaagtgtcgtcatcttgttcagcagtatctcgatgccactcgcggcgttggttggggcaaagaccaccgtcctatctctcttcacggtcctaagccagtagctgttgaagaagctgaatgatgttgtgtgcgtgattgatctttggtgagtgagagctttgattaccatacatgaatggagtctctgttgcaagttaatgctccacatcaaggttgttacttgatttatgcttttctgtttcgtaaaacatatattactaattggacttgggagttccaattggttaagctcagcttcgtttttcaaatgatttatatatatttttggcttgttgtacattgcgtccctgtttgtcgaaataatgaaattcccaagtacctttttgcaaaaaaaaaaaaaaaa

SEQ ID NO: 43 - DNA, 476 bp, Arabidopsis thaliana
  misc_feature (1)...(476): n = A,T,C or G
gagcggccgcccgggcaggtatttgatgaagcttctcgcttctggaatttgaaaaggatttgataagacgagttcatagaagattaccgcaagttcatcaactttttgaacttgttatggagataatctcactgaacgttgtgccccagtgctctgtggttacttggagtagtaaattagcaacgaaaagattggtcccaaatcggtcaagtttgttattctcaggggtcaaaaaatccagacttgtgattcgaagtggaaattccgatggttatgttgttggtgagaatgatgacttgggtcgtatagccagaagaggagaatcaacgtcaaaggttttgattcctggtttgcctgatgaatcaaatggtgaaattgctgctcgaatcagtcattctcactgcgagtggaagcccaagcttagngtacattatgagaaagccggttgtgacaatctcgatgctcctgcggtgttg

SEQ ID NO: 44 - DNA, 476 bp, Arabidopsis thaliana
tcgagcggccgcccgggcaggtgaaaaggtaaaaaagacaaatcaaagagagacgattcgatcgcatcaatggcagaagaaaagagcttcaagtatgtgatcgtcggaggtggtgtcgccgccggatacgcggcgagagagttcttcaaccaaggtgtcaagcctggtgaacttgctatcatttccagggaacaagttcctccatatgagcgtcctgcacttagcaagggatatatccacctcgaaaataaagctacacttccgaatttctatgttgctgctggaattgggggagagagacagttccctcaatggtacaaagagaaaggtattgagctgattttgggcacagagattgtcaaagcagatcttgctgcgaagacacttgtcagtgggactggacaagtcttcaagtaccaaactttgctagctgcaactggttcttctgtcataaggttgtcagattttggcgtccc

SEQ ID NO: 45 - DNA, 476 bp, Arabidopsis thaliana
acaagatagtgccttaaacaaaaaagtgggaaaaaacagagcttttggcagatacataacacacaaaaaaacaactccgaagagttgtaatggcggattaagaagttacaccgccattgccaaaagctctacagtggaagaagataaaaggcactatcacgaacctaaaccaaagaacaaatgacttctacaagaactttactgaacatagagagacaacaactccaaaaagacggtcaagactaaaccctaaactagattaccagaactcagtgacaggcttcacaaaaacactaacagttgtagaaacaggctcctttgtttagaaggaacctgccaaaaattttaaaaaacaactgcagtgtcctgagaaagaaactaagttctaggtggaatctatgggttttagcgaccaaaacctaggaaaaagacttggactgatgatgatgatactaaggttttgtagaaaaagtggg

SEQ ID NO: 46 - DNA, 476 bp, Arabidopsis thaliana
  misc_feature (1)...(476): n = A,T,C or G
ctttttttttttttttggccattatatagttctagattcattgtcaacaaaagttttacagacttacacatatattagctagaaaaaaaccaccaatagaatgtcaaaggacagtccaccttagaggctagagattagagatcatacatcatctgaaatcttaaagttcatgaaactatgacagtgtaaatgtcgnnncgaaatcttggtactttttcaccaaaacgaaccaagtcaggtcgtgtaaaagcctcattgaattggcaaattctctgcttcatgtctgactgattcgaacaatgaggtcgataggtaacgttccccaccgctagggaaaatcacaactatgagtttgccggcgttttctggccgctttgccacctttatcgcagcggctgcagcagctccagaagatattcccaccagtaatccttctttcagggcaagaagtttggctgtttcaattgcttccacac

SEQ ID NO: 47 - DNA, 476 bp, Arabidopsis thaliana
  misc_feature (1)...(476): n = A,T,C or G
catcgaagaaggtttaattttacaggaagtgaaattgtatgctgaagatggttcagtggactttaatggaaacccaccattgaaggagaaaacaggaaactggaaagcttgtccttttattcttggtaatgaatgttgtgagaggctagcttactatggtattgctgggaatttaatcacttacctcaccactaagcttcaccaagnaaatgtttctgctgctacaaacgttaccacatggcaagggacttgttatctcactcctctcattggagctgttctggctgatgcttactggggacgttactggaccatcgcttgtttctccgggatttatttcatcgggatgtctgcgttaactctttcagcttcagttccggcattgaagccagcggaatgtattggtgacttttgtccatctgcaacgccagctcagtatgcgatgttctttggtgggctttacctgatcgctcttg

SEQ ID NO: 48 - DNA, 476 bp, Arabidopsis thaliana
ttggaaagtattcaacaaaaacgtataagcaattatgtgtttacatagagaggtcctagagttttcaattgggattctgacactgtttatatggaggagtgttagcttcagtttcctctaccaaaaaatggaatgtacaatctagtataataatatgtggttttaaacaccacaaagaatcagatcatatggttgatcttagtattaggtgaaaactttcctttttcgtgtcgtcacagcttctgcctcaggttcctctcgaggcgggactcttaagtgcagcttcataatatcatacactgtgaatccgattgccacagacggtacaaccttaaggtaattgatgctaagccctgagaagagttgcttccaaccttcttctcttgcaatcttgaaaagggtttgcattgttcctcttcttgtttcttccttaacggctgaatatagtctctcaacctgcatttgtctccggacaa

SEQ ID NO: 49 - DNA, 476 bp, Arabidopsis thaliana
gctccgttcatcttctccacacatcaatcatcactctttccttcttccttcttttgtttcctccaaattcaaacaccatactttatctcctcctccttctcctcctcctcctcctcctatggctgcgtgcatcgacacctgccgcactggtaaaccccagatttctcctcgcgattcttctaaacaccacgacgatgaatctggctttcgttacatgaactacttccgttatcctgatcgatcttccttcaatggaacccagaccaaaaccctccatactcgtcctttgcttgaagatctcgatcgcgacgctgaagtcgatgatgtttgggccaaaatccgagaagaggctaaatctgatatcgccaaagaacctattgtttccgcttattatcacgcttcgattgtttctcagcgttcgttggaagctgcgttggcgaatactttatctgttaaactcagcaatttgaatcttc

SEQ ID NO: 50 - DNA, 476 bp, Arabidopsis thaliana
cctccagtgttaataaaaagtttaattcttggcagattcttttgtttgccactacaaaagcacaattatttcttcgaataatttattatgaaaaacaggtttgcagagatgtggaaagagctgcagattaaggtggcttaactatctaaagcctgggattagaagaggcaaattcactcctcaagaagaagaagaaatcatccaacttcatgctgttctcggaaacaggacatactaaatcttgttattcttgaaaaaataaaggtgggcagccatggcgaagaagatgcagaatcgaacagacaatgatatcaagaaccattggaactcttgtctcaagaaaagactttcgagaaagggaatcgaccctatgacccacgagcccatcatcaaacacctcaccgtcaataccactaacgcagattgtggtaactcttccaccacgacgtccccgtcgacgacggaaagctctcctt

SEQ ID NO: 51 - DNA, 476 bp, Arabidopsis thaliana
  misc_feature (1)...(476): n = A,T,C or G
gaatttttaggtgaagggaaaagcttctacgagaattttagtctcagaggaatccgagtcaaccgagtcgaaccgggtttcatttcctgctctttcaaggttcctcttcgtttgacggacagagacaagaatttagcaaatggtgcgattgcaaatcttgtggatgaagttggtggagcacttgtacatggcgaaggcttacctatgagtgtttcagtggacatgtctattgcattcctttcaaaagctaagcttggtgaggagttggagataacgtcgagattgttaggagagagaggaggttataaaggaacaatcgttgtagtcagaaacaagatgaccggggagattatagcggaaggtcgacattctatgtttggtagacaagctagtaagctctgagtccaacttttnngtcttgtatcactgtaatgtctgttttcaataataagattatggttaggtaaatttggtta

SEQ ID NO: 52 - DNA, 475 bp, Arabidopsis thaliana
ctttttttttttttttttttgctcaaccatatgatttcattaatatataatagtgaataacagttctatcatataaataaataatttataatccaccacatgacaacagatgggttttcccattttatttaactataaacagtattttgctctcacagatccacaaggacaagcatattcaaggatgttttagttcttaaagaaaagataaagagagaccagacgcatagtggtaacttggtctacaagttagagtggccaagccggagaaggacacggtgccacgaagtgttgagaactcctcttaggttccacaccgactccacattttccggttgaacattcgccgccgaatcaaccgctttggcgatgacctctgtagtctgtgaaacatcaatggtggcttcaaacaacacccatgcccatttgtcactggagctgtgttctgagatgtactgctttcctggttcctgcg

SEQ ID NO: 53 - DNA, 475 bp, Arabidopsis thaliana
aaaacggttatattactttttagttaaatttaaaaagaaaactaaaagggtaacattagtagaattcttgacaaaacaaaaagaggcaacattagtcattagaatttggatttctcaaaattgtaacggttcacataaccaataactttgggttattaatcaccaaaacaaaaaaacccaaatttgttagcttaaagaaaagccctgatttttaaaaagcccaaattgtctaaagtcaagacgatgaccttctccggcgagtcgacggcgtcgatttatcaccgacggtagtaactgagccaggactttcagatgtatctgagctactaacatctccaacgccatctttatctttacctgtccaaagcttcgagaaaatccgagacattacaactccttttgctttcgtcttctcagaactactcgtcttgtctctcgtcgtagttgtcgtctcctccgtggctgtgactgactc

SEQ ID NO: 54 - DNA, 475 bp, Arabidopsis thaliana
tttttttttttttttctcagtaacaagtcataccatttcatgatcaatcatcattttgattcatatttttattgaaaccaagtaatacaactgtgaacatgtgacaatttagactggttttgaagaacacgtctattgctttctgtctgctgcttcaaggcagagtataagctccacatttgtaaccgacgggacgattagcgatgttgcagcgtttaggaatagtcatcgagatctctggctttgctccggagctcctagctgtggaagaaagcatgacagcacaaaggcattttggattctgccccatctgtttcactcgagcacagcaaattgctgacactttagcagatgtgtcttgtgcagccattgcacaaggagccaactttatggcttctctgtctggaggatttctcccacattctccagccccataaaccatggttttaaggctgtagatgcagagaactaggag

SEQ ID NO: 55 - DNA, 475 bp, Arabidopsis thaliana
  misc_feature (1)...(475): n = A,T,C or G
tggcatctcggtttaattgctggaatcgttgtgtttatatcgtcaagtaggttcttgctactnaagatcttggccagattttgctgattctagtgaagcagcaaaccgacagattctcacttccctcgaacctctagattaccttgttgttgcaatgttaccgggaataagtgaggagctgctgtttagaggtgcattaatgcctttgttcggaactaattggaatggtattgtagcggttggcctcattttcggtttacttcatctcgggagcggaagaaagtattcttttgcagtttgggcttcgattgtcggtatagtctacggttatgcagctgttttgtcgtcgagtcttatcgttccaatggcctcgcacgcactcaacaatttggtgggaggtctgttgtggcgatatagttccaagatcaagtcattggagtgaaataaacaaaatttacaacagggttgaattaaa

SEQ ID NO: 56 - DNA, 475 bp, Arabidopsis thaliana
gcaggtacttttcacaagccctaaaaccatgccacgcgtcacgaaagcgtccataagtttagagctcatgacccacgtccctaggtcgaccataggacctatcgccgccgcatgcaacacggcggtggaacggaggagatcagaggttgggatagaggagaaaagacgggcttgatcggagagatcgagaccatcgtgagattgctcagtgggttttgggtggtgaagaggtggttccggtgcttgttgtccaaaggagagaatctccgggacgacggcggtggaagcagtcacggtgggaggacccaccgggctaaaagcgggtaaacggtgagatcgccggataaagtttgttcggagaagacgggttgccataaaattcaaagattttgtttttgaaaacgaaaacaaaagaaaaaaattctcctcttttttttgtttgcttgatgtttcggttttatcgctgttttttttc

SEQ ID NO: 57 - DNA, 475 bp, Arabidopsis thaliana
  misc_feature (1)...(475): n = A,T,C or G
attcgcggccgccccaaatgtaaattataacaattaggaagaggtgaggctgcggatgagaaggccttcgaaggtgattccaggtccgaaagctaagccaagtccccactcttgtgctgcgtcacctttcttcttcagctcatctctcatatactccatcacatacagtatcgtgttgctgctcacgttcccgtaatccaccaacgcccttctgctgctctccagcttctctttctccagcttcagttttgtctccagacggttcagaatcgcaggtcctcctggatgaacagcccagaacatgtcattgaactccatcgactcatcgccagcctttcccatcagcttcttgcagaactcttctatgttctcctctatcttctgcgggaggtcncgtccaagcttgaagtttatgcctnnntcagtcaacctcccctcgatcacgttctgtgtccccggcaagaactgctgaacc

SEQ ID NO: 58 - DNA, 475 bp, Arabidopsis thaliana
ccacgcgtcgattctttgtataaaaggcttctccttttctcaattcttcggcttcctttcgcccaaactcttccctcgaatctttccttctcgtcttaaagctacgaaaccctagatttcggatttcttcgctatccaaagaagaatgactgatcaaggattggaagggagtaatccagttgatcttagcaagcatccttcagggattgttcctactcttcaaaacattgtctccacggtgaacttagactgcaagctagatcttaaagccatagctttgcaggctcggaatgctgaatataatcccaagcgttttgctgcggtgataatgaggatcagagaaccgaagactacagcattaatattcgcctcagggaaaatggtctgtactggagctaagagcgaggacttttcgaagatggctgctagaaagtatgctaggattgtgcagaaattgggattccctgcaaaattc

SEQ ID NO: 59 - DNA, 475 bp, Arabidopsis thaliana
gttcgttggcccatctccgccgcacacaccactcgttaaccgccgtaacatcaacaaccaccggcctcgtaacgcaaccgtcacctccgctttacctgatattttcctcgcggcggtctctctccttttcctctggtcatctcctaaacctctagtctctcttcctccgaacagattctctttccctctaaatcctcgccgtcgatccatcaccgccatgtctcgccgatctcctcctcctcctcctcctactcaacgcttcgctaatcctcaatctctctccgattggctcgaatcgcgattaccttccgattcattcgccgcttggggagtcaaaccgggaaccaaaaacgttcataacctctggctagaactctccgacggcgaaacttctctcgccgattcaactcctccagtacgcaccgtcaacgtcgtcaccgttcgagtaatcggaaaaaacggacgaatcctagtg

SEQ ID NO: 60 - DNA, 475 bp, Arabidopsis thaliana
  misc_feature (1)...(475): n = A,T,C or G
gtttggattagccacttcgagttttctgggtactcaactaatcccggcgactctgttaagcaaacgagctcgagctttgtgtctcaccgtcacagcgaccggtggcagcagaaacaataaggtttacacgaggcttgattcttgtctagtgattcctcctcctactaaattcaagaaaccgcgtgctattgttaaattcttgggaggtgccttcgtcggagctgttcctgaactcacttacagttaccttannnagctactggcaaaggaagggtatttgatagtatctgtgccgtacaatgttacatttgatcatgaacaagctgctaagcaagtttatgagaggtttaattcatgcttggacacgattgtctcatctggaattccaaattcaaacttgaagcctgaagatttagctgaccttcctcttttctcagttggtcacagtaatggtgcactgctccaagttttgacc

SEQ ID NO: 61 - DNA, 475 bp, Arabidopsis thaliana
tttttttgatctaaagataatattattggtatgatgcaacaacatctaatgatcttgaaccagctaagttctagatcaaccagattctaaacaatccaactcatagtttcacgaatcagaaccacagaccaaagaaaagaaagcaaaaccaagcagccgaattgatgcaatgcattcgcctggcttaactaagattcacagtccatttcatgttgtcttcaatcagacccatctgcaagcttgtcagaacggtgtagagttgcttcgacacagttccgaaggtaccttctccgtaagacactcttttgcctttgtaagtgacgcttccaacaggagagacaaccacggcggttcctgtgcagaaaacctcgtctgcttctaacaattcatccactgtcacattccgttcctccacctgaaacccttgtgttcgagccacgtctatcatactttttcgagtaataccgggtaaaat

SEQ ID NO: 62 - DNA, 475 bp, Arabidopsis thaliana
tttttttttttttgaagaccaaaacacataattaaaaacatgtcattaaatagaatacatttttcaacgtaaaacatttatatcagtttatcaacaatagaacgtgctttgcacatggctcttaatggtatagctttgggcaatgtggctcctttgtcttcggtcatgtccacaaaatcctcaccaactctttcccactcaaaacattgaaccaaacttccaagagcctggtttattagccgatgagctagcccggctccaggacaagctcttcgtcccatcccaaatgagattagcttctcagcctctccttctttttcaaatctttctggtttgaatatctcaggatcttcccatacctctggatctctatgcatggcccatgcgttggtcaataccattgttccacttggtatatcgtagcctccaactttacaatcttctgatgacaaatgaggtagtagtagtgggactg

SEQ ID NO: 63 - DNA, 475 bp, Arabidopsis thaliana
  misc_feature (1)...(475): n = A,T,C or G
ttttttttttttttttttttttttttttttttttttttttttttttttaagcttacaaaaatctatttcaataaaaacctcaaaaggctaataatatgctcacaaaactttgtctcctgatgctacatgaatagagctacaaagattgatgctctcgtctccgttcttttgtgtgattgactataacgagtcaaaatttggttacacttacgctaaacgaaataacttaaactgtcttctgttttttggtcgagctagaatctttgccatccttctggccaacgnctcctctcttagacccattagggttgaaggttttgagtgggtcgctgccttttctagaccgtttcttgtttttgttgttgcgaccaccgcctccaccagatctcctagtgttgcccattgcggctctagctagctttaccatcttgcttgcttcttgagtctttgcgtccactagatactcggggatgtc

SEQ ID NO: 64 - DNA, 475 bp, Arabidopsis thaliana
tttttttttttttttgataatataattaccttttagtaatcaaaattagattattgttgcctggaagttgaagaaatgaagattaatgtcttgtataatttatattttgtttcagacctatatatacattgtcatgcaaggaatagctgaaagcagattttttttcttttgagaaaattactactcaaattatctgccaaaccgattaaaattacttaatttcaccatcggtttacttatttcaagctgtctgaagtaatttatcgttgttactctcattcttcctcgtcgatttcggagttttcctgattactttcaccctaaacgccgccttcttatctgaaccaaactcgatgatgtcggacgatctaaaccgcgcgggaaaattcggtgttgctctatatcttcttccttcgttatcggtcacataggttccgtgttcgcttcgaagatccatcaagaagaaagctccgtc

SEQ ID NO: 65 - DNA, 475 bp, Arabidopsis thaliana
ttgaaaagttctaaccatgccacagtaacttaggctattctctctcacataatcccagactgataaacactcgagataaaaggagttttaaagtcttgctactgcactctctcttcctcaaattatctatacacagcccagaatgcatgattaaaaaggaaacccacgactgcttcaactgctttaaccctggtaggggttgccactgccatcccggttaggtgggtagttgttctggtactgtggctgctgcattccactaccctgctgctggtagttgttgttctgtgggggtgctcctccgtattgaggtggtggtactgctccatattgaggtggtggtcctcctccatagtttggtggtggtgctcctcccatgttgtttgctggtggtgctcctccatagttgggaggtggtgttcctccatagttctgaggtggcctcggtcctcccatgttgttttgcggtggtgct

SEQ ID NO: 66 - DNA, 475 bp, Arabidopsis thaliana
agcttgatatcgaattcgcggccgcgctatgaaaatctacagtggcctttttcctctaaagaacggggagggggtactttctaggatcgcagcatatgccctatatctcgaggaaagcttacgtggtctcattgcggggccatttcttagtgagagtcttaggtaccagtggcgtaagaagttagaggaagcttcaacatgcaaagcgatgaaagccctcctgcttgaacttgaggaaaatatttgcagtattgctctgtcaagcgactggcttaaactaatggacgattggttgatagaactttctatctttcaaagcgctccagttactgttggggccacacagaaacgtagacctggtaggaggaagcagaggaaccaggctgaaaatacggcccaaggttctgatgatgatagctttacttggtggcgaggggggaagttatcaaaaattatactcctcaaggcagtcttg

SEQ ID NO: 67 - DNA, 475 bp, Arabidopsis thaliana
ggatcctctagagcggccgccctttttttttttttttttttttttttggtttaaagaaataaaaacaaatacttgacaaaccacgaaggtgagaaagaattggaagtggctttttgaaagtttcacaaagtaggaagcatcaaaaagaaatagacgtttcgtgccctctgccctaatctttctcattggaaacataaattaagtttctctctgtttatttgatctacccaaagaaatctcaaagcagcaaaaagacaaaaagaaaaatctcgaaattgatggattcctagagaacgaaggagaagaatgtgcttttgagtagtttaggtcatcacttttgatacaacaccagctccaactgttctacctccttcccttaaggcaaatctttgacctgtttcgagtgggacaggcatgattaactcgaaaacagctgtgacattgtcaccaggcataaccatcttcacgttttcgg

SEQ ID NO: 68 - DNA, 475 bp, Arabidopsis thaliana
aagcttgatatcgaattcgcggccgcctggttcaaaaatcactacacttgcacagaaaatttgtttgcaagctaaaggaatccgtatcccagtgagctactctcgcttcggaattttgcctatctctcagctttacgagcaaacctggtcggtctatcttagtatccataacctgagttgtccattgggttaccagcaggaactggctctggctctgggatctcaacaaccacacagtcagacatcaagaacgtctttgcaactgaggcggcatgttctaagcaacatctcacaacctttgtcgggtcgatgatgcctgcagccatcaggtcttcatacttgccggttgcagcattgtatccaaatttcacattatcgttagccagcaccttctcgctgacaacacttccattaacaccagcattcttagctatcaatttcagagggtaactcagtgctcttttaacaatttccg

SEQ ID NO: 69 - DNA, 475 bp, Arabidopsis thaliana
  misc_feature (1)...(475): n = A,T,C or G
ggggaatcttgaaatcaccatcacatcctctcttccctcgatctccgttatcgactgtaaatcgaattttgttgttgctttgttttcttgggcgaataaaagaggataatttagtggcggggttttcgagaaagagagagaaagaatgagttttcaagatttagaggcgggaagaggaagatcattagcttcttcaaggaacatcaatggtggtggtagtagacaagacacgactcaagatgttgcttctggtatatttcagatcaatacaagtgtttccactttccatcgtcttgtcaatactcttggtactcctaaagatacgcctgagctcagagagaagctgcataagacaagattatatattggacagttagtgaaagatacatcagctaaacttaaagaagctagtgnnnnnnntcatcaaagaggtgtaaatcaaaagaagaagattgtggatgctaagcttgcaaag

SEQ ID NO: 70 - DNA, 475 bp, Arabidopsis thaliana
tttttttcttcttcggttgtatgatttacgaatcgatgtacagtaaaaacaaaaattcacctgtatattgtatatatgtatgtaccggtattaataataagtaaaccgatcgagactggtcaagaatccaacgcgaacggcgtttgaagaagatcatacggagcccaaagcgcgtctaaaggacaaggccgaccagcatcaagcctagcccatggcttacctttcccactccaatgcaacagactcaccggaccaggatggagatctctacacagtcctctgaaattatcacctcctaaaccgtgttggttccaccgatgattaaccggtttaatcaaaccggcaaaaaccaataaaaacggtggtaacgaaccaagctcgtaaattctcattctcttttgcatcgccatccactcttcgatgcgtgacgtgtacgcgccttcgcgccaccgggaaagatcgatcaccatgactc

SEQ ID NO: 71 - DNA, 475 bp, Arabidopsis thaliana
tagctaccaaatgactccagatgatgaagtggaagatatgtttgtcttgttaagtgaagtgaagagacagataccttccatcactgcagtatcgtctggtgccattgcatcagactaccaacgactgcgtgtggagagtatttgttcaaggttaggccttgtttctttggcatttttgtggaaacaagatcagacattgcttcttcaggacatgatagcaaatgggatcaaagctattttagtcaaggtcgcggcaatagggttagatccctcaaagcatttagggaaagacttagccttcatggaaccatatcttttgaagttaaaagagaaatatggaagtaatgtttgcggggaaggaggagaatatgaaactctgactctagattgcccgcttttcactaatgcgagtatcgtgcttgatgaatatcaagttgtgctacactctccagattccattgcacctgttggtgtt

SEQ ID NO: 72 - DNA, 475 bp, Arabidopsis thaliana
ccaccgcgtaagccaccgtctcgtcttgaaacgcaccgtattcatgacttcgtcggagccactcgacctggttgtcaccgtcgtctctgccaagcacctgaagaatgtcaactggcgtaacggtgacctgaaaccctacgttgttctgtatcttgaccaagaccaccctctctccacccgctccgatgattcctcctccatcaaaccggtgtggaacgagcggattactcttcctctcacccgatctgtccacgaatcggtcctcaacatcgaggtttttcattccaattcttcggatctggcgaaaaccctcgtcggatcggttaggtttcctctagctcgtttgattgactcggacgggtcaatgattccggaattgatcaactcgctcgagctggttcgtccatcgggtcgaccacaggggaagattcgtttgaagctcgcgatcaaagacagaccaatccctccaccgcag

SEQ ID NO: 73 - DNA, 475 bp, Arabidopsis thaliana
aacgtcaagggaagaggcctctcttgactggtgatgtgcaggtcacgttgaaagaaggtgtgggaacattaggggaacttatctttacggacaactcaagttggattagatgcagaaaattcaggctgggtttaagggtctcttcgggttactgtgagggaatgcgtgtacgcgaggcaaaaacagaagcttttaccgtgaaggaccatcgtggagagttgtacaagaaacattacccacctgctttggatgatgaggtctggaggttggaaaagattggaaaggacggggctttccataagaaactcaataaagcaggaatctacaatgttaaagaattcctgcgtcttatggtcaaagactctcagaaactaaggactattcttggaagtggcatgtcaaacaggatgtgggagacacttgcagagcattccaagacatgtgtattgagtgaaatgctttacgtctactatcc

SEQ ID NO: 74 - DNA, 475 bp, Arabidopsis thaliana
taacttgagagttttgagagacttgactacaggatacaaactacaaagaaagtggtcaagactcagaatcggtgaaagatggactctctaggtcagccatgcttgcagaggcaaatgactcgaacgagtccactgtggagagtgaagatgtatcttcggaatctgagtcgtcatccatctcagggaggacgatgtgatgatcgtcttcttcttcttcttcacactcatattcttccggttctgaagcatcctcagaccccatgagtagcctgttgatagctgacttggcggcttctgtgaaccactctgtcttcgggagtgagctttgtgggttgatgcctctttccgagaatatgttgatggctcgattgatcaccactgatgcatggttctgaactactttaaatggataacctgcaaacctggctatctccactgtgaagttcatgtcgaggatcaactgttgcaatccaga

SEQ ID NO: 75 - DNA, 475 bp, Arabidopsis thaliana
  misc_feature (1)...(475): n = A,T,C or G
tgctggcatgtcgccaatgggagtttccccagaccaactaccaatattagaaaaggagatggctaacctaaaactagaattacagaaagaatcagtgttgaggcagcaagaacaacatcgtttagctgaagaacaaactcgagtagcttctttaatgtcagaaaagcaggaactnnaacagaaaatttcagttttatccagcagggcctcagtatcagagtctggtcaaaaagtattttcagtggaagataaagaaaaactcgagaagcagttgcatgatatggctgttgcacttgaaagattagagagtagtaggcaaaaacttctcatggaaattgacaaccaatcatctgaaatagagaagctatttgaggaaaactcgaacctctcagcttcgtatcaagaatcaatcaacatatcaaatcagtgggagaatcaagtgaaagaatgtctgaagcaaaacgtagaactccgt

SEQ ID NO: 76 - DNA, 474 bp, Arabidopsis thaliana
cctttttttttttttttttgagaagaacactaaagattattgcaacttgtaagtacatcttttaaaattgtcattaaagccagcccaaatgatagtggaaacaaacaggccttttctaatgggcctatttggatacggaaagcccaattaggtcgatctaatcgtgtgacatgtaaggactttattaaccaccgtttcaaaattcacgtacgatgatcccaacggtggcgccgaagcttcttccgccaagcgccgccactccaccaccttctctcttaacctctttcccttctctccgtccatgagctctttaaccaccttctccactctctccctcttcacctcctcgccgatctccatcccaatcccccaatcctcgcaacagaactttcgattcgtcaactgatcagcaaaaaatggccaacagatcatcggaacaccggcgtacaaactctccaacgtcgaattccatcc

SEQ ID NO: 77 - DNA, 474 bp, Arabidopsis thaliana
tattaaagagaaattgaacaaattctcatctattcatacagaaaccaaaccaacaaacaaactggtcgataaacaaaaatccataacaagaaagacgagaatgagaagagttttaaggtctcaacatcagacatttctttctaggttggtcttggagttgcccattcaaccctgaggatgaggttatcataaccataaccattcaatttgttgattgctctttgagcgtcttctctgctcacgaaattgacgaaaccaaatcctctgctcactccagttttctgatcaatggccacatagacacgtgtgacagctccaaacggatggaacagctccatcaagtcaggttcacgggtatcctcggacagattggttacacgcacagagttctcatcgttcctcctcctcatgtctgaacccacagcgcttctgtctgcacctgctctcatgctaggcgggacatacgcggccttg

SEQ ID NO: 78 - DNA, 474 bp, Arabidopsis thaliana
tcgagcggccgcccgggcaggtttcgatctcaaaattcgatttttgaaagatctcgttcaatttcaccattcacggaacctaacggaggaagaggtcgatcatgaagtttcgttcttcctctggtcaaattcgatttgtgttttaaaaactgaagtaaacattaaacaatgtcgaaaccggtcctgctcgtgtgtctactagttatacttatagttacctctcagtttgaatggaggcaaccacttgttgagttagatacagccactagctcgtctcagaaacagcagcaaatttcagatagggaagaagctgtcaaagagaagatcattatatcacaagagagacatatccagaggctaaatgagctagtcaggagtcttcaattgcagttgctgcaatgcaagggagagaatgagacccaaaatgccaccaaaagctatcatataaataaacaattcatcgaggtcgaaagg

SEQ ID NO: 79 - DNA, 474 bp, Arabidopsis thaliana
  misc_feature (1)...(474): n = A,T,C or G
ttgcacgtgcctaggtgcacgccggcgggcccgacctccggcaccaaccataaacacacagcggatcccaacaacaggtcgcacctcttaggctgacatgaaccctaacggatagggaaactgtgcgtagtctgctcctctcggacntggaaaaatgaccatgtagcatcttcctatcaacaccaaccctcttcatcactttggattgtctctggatttcctttgatcccacaaacacaatctctgaactcaacgagttcaacgacgagctattcgttcgaagaactatatcctcaaatgtcgtcccaaacatcgttttgatttcaccattacccttgatggtttggatcttgtgaccattaagaacatcgtttgctctcgtccacgtcataccgttgacagtccaatcacacctcgttttcctaaacgtgttcctaggtgccggcgcaggccgcgcggccatggttaattaac

SEQ ID NO: 80 - DNA, 474 bp, Arabidopsis thaliana
tcgagctcggtacctcgagcggccgcccgggcaggtcttggtcgtcgacggcggatggagtgtgccgcgcgtggttttgcgacgcggtgtgttggtccaccgacgcggaggtgtggtcagtgtggtgctgtagcttattgctccgtctctcatcagatttcgcattggagctatcacaaggaagaatgtgagagattagaagagcaaatgcgtcgtgttgatcttttaaatgattttccatttacatttacagaagaagctacaattcaggttagtcaaaaacatgagactaggtgctcattcttcatcaagaggggattacatcgtgttggaatgtggatgtatgagtgtaactgtggagctttggcttttgatagttttaatattgaagggtggcatttgccgagctcttcttgtccatgtcgtgggcctttatctccaataactaaacagctatgtacctcggccgcgacc

SEQ ID NO: 81 - DNA, 474 bp, Arabidopsis thaliana
aatcggagatccttatggggagttccggagaagcttcagcttcacatagcgatgctgacgttgcaattcggttacgccggattccacgtggtgtctcgagctgctcttaacatgggaatcagcaaactcgtcttccctgtttatcgtaacatcatcgccttgcttcttctccttcccttcgcttacttccttgaaaagaaggagagaccagcgattactctcaactttctcatccagttcttctttttggcactcataggaataacagcgaaccaaggattttacttgttgggactggacaacacttcaccaacatttgcttcctccatgcaaaactctgttcccgccattacctttctcatggctgctcttctcaggattgagaaagtaagaataaacagaagagacggtatctccaaaatcttaggaacagctctttgtgtcgccggagcttccgtcatcaccctctataaa

SEQ ID NO: 82 - DNA, 474 bp, Arabidopsis thaliana
tcttctcctctcctctccgtcgagcttactatctccacaaaatggcgtcgacggtaggagttccatcactataccaagttcctcaccttgaaatctccaaacccaattccaaaaagaggtctaattgtttatctttatctctcgataagcctttcttcactcccttatctcttgttcgtagaactcgtcgtatccattcctcttctcttcttgttccttctgctgttgctactcctaattctgttctcagtgaagaagctttcaaaagtcttggtctttctgaccatgacgaatatgaccttgacggcgacaacaacaacgttgaagctgatgatggtgaagaactcgctatctctaaacttagtttgcctcaacgtcttgaagagtctcttgagaaacgtggtatcactcatctcttccccattcagagagctgtgttggtacctgcactgcaaggaagagatattatagctc

SEQ ID NO: 83 - DNA, 474 bp, Arabidopsis thaliana
accttgacaaggaagccaagaacaggttccgtactgattataatttgttcaatctcggatccatggctctccccatagacctccctggctttgcgttcggcgaggctcgcagggctgtaaagaggctaggggagacgctcggcatttgcgcgggaaaatccaaagcgaggatggcagcaggagaagaaccagcatgcctaatcgatttctggatgcaggcgatcgtcgcggagaatccgcagccaccgcactcgggagacgaagagatcggtggtttgctcttcgattttctctttgccgctcaagacgcgtccacgtcatcactcctctgggccgtgacgcttcttgattcagagccagaggtgctgaacagagtaagagaagaagtagccaagatctggtcacctgagtccaacgccttgatcaccgttgatcagctcgcagagatgaagtatacacgctccgtggcgcgtg

SEQ ID NO: 84 - DNA, 474 bp, Arabidopsis thaliana
  misc_feature (1)...(474): n = A,T,C or G
ccacgcgtccgagcaaaacaccaaaacagagttcacagaaacatattcaaagatttttcacaaatattaccattttaaatctataaacaatgacgaactcggtggctaagttggcactactagggttttgcattctgcaagtgacgagcttacttgttccgcaagcaaatgctagggctttccttgtgtttggagattctctcgttgacaatggtaacaatgactttcttgctaccactgctcgtgccgataattacccttatggtatcgattttccaactcatcgtcctacgggccgtttctccaatggtctaaacattccagatctcatcagtgaacatttgggtcaagagtctccaatgccgtaccttagtccaatgctgaagaannacaaactcttaaggggagctaacttcgcctccgcgggtattggaatccttaacgacaccggaatccagtttctgaatattatta

SEQ ID NO: 85 - DNA, 474 bp, Arabidopsis thaliana
aggagctactataagtgtacaacaccagattgcggagtaaggaaacatgtagagagagcagcaactgacccaaaagctgttgtaacaacatatgaaggtaaacataaccatgatgttccagctgctagaaccagcagccatcagttaagaccaaacaatcaacacaacacctcaacggttaacttcaatcatcaacagcctgttgcacgtttaaggcttaaagaagagcaaatcacttgacagagaagaagaatacgacggcgcttgagcttttgtgagtttaatgaatcttctttttggttaatgaacctgtttttgttgcctcaaaacaccacaggtttctctggacagaatctctgatattacagtttcaaaaggtatgttcttttatttcatgttggaatcttctgtgtaatcttaagaagctttaggaggtaatgtaaaaaaccagattcaaagttatgcccttatgtg

SEQ ID NO: 86 - DNA, 474 bp, Arabidopsis thaliana
ccacgcgtccgaaaactgttgcacagtgtaaagctccatttgatgatctccctaaatccgtcattacaatgcatgttgtcgtgcaactgtctccaacaaaagcaagaccagagaaaaaaatcgaaaaggaagaagccccacagagaagcttttgctcatgtaccataatgtgagaacaacaacaagtcccaagtcaaaaaatctgaaagagttaagttttgattctctgtggtatttgctaaaagaccatataaacataaactaccgcttcatattcgacattttcttcacaagttcaaagaaaccttcatctatggcgttataaagctagtctattagagttgtttctcttgagctgtgatggaaaaactcttgtttggagcatcctttataaagataagagttttgttaccgcgaactaattcaagtatctctgtaacatatcttgtatggtaaaaaaaaaaaaaaaaaaag

SEQ ID NO: 87 - DNA, 474 bp, Arabidopsis thaliana
  misc_feature (1)...(474): n = A,T,C or G
cttttttttttttttttttgagaaaaattcacgtgttggtagattactggattgttattagagagttgtttgaagtatagtgagcgaattaaaaatttactgtgttgcttgctgcactaaaattacgatgtcgtttttgaatctaaaacatgtgagattataggaattttctttgatacaaatctcatttgaagangnttttaaaatattttcagtccccgccggcgtaaaagattcatattccggcagatcggagagcgtactcttgcaccagcgccgcaaacagagacggcctctccagcaagcgagccgggctatcgaactctttcgctttcccagcatcaatgacaaggactcgatcgccgtccatcactgtaggaatccggtgggcgatgctgatgatggtgcacgacgcaaagtcttctctgatgatcttctgaatcacggcgtcggtttgggaatcaacggatgcag

SEQ ID NO: 88 - DNA, 474 bp, Arabidopsis thaliana
cgaaaacaacctttattttaaaaaatccgaggccatacaattcaattttaaatacatcttttgaattataagaaacagattttcttctagttttgtatttcctttttcaaattcgtttcgttagaaacattaaaatctcttaaaaatattttgggaacaacaagaaaagtgaaaagaaaaaaacagagtcaagacttgatgactccaagagtagaagcttgaagcgacaccgtatgactctcatctccaatatgaatcccatgatcaccgatcggaatccttcggttcccggctcggtccactacacttaaatacttacacacgtgtatattcacctgcacacgcttcttctccccaaccgccacgtgtactctctcaaaagcaaccagctgtttcttcggagcccattctccacccggcggagcgagaacacaagcattgtgtgcgtcccatctctcgagccaacgttagtaa

SEQ ID NO: 89 - DNA, 474 bp, Arabidopsis thaliana
  misc_feature (1)...(474): n = A,T,C or G
cgtttctatcatttccttaatattgaaatggtgacagacttcaaatccctactaccagttatcgacatcagtcctttactggccaaatgtgatgatttcgacatggctgaggatgcgggggttgtggaagtagtcggaaaactggacagggcatgtcgggacgtcggattcttctacgtgattggtcatggaatatcggatgatcttataaataaggtgaaagagatgacgcattcagtnnttcgagcttccttacgaggagaaacttaagatcaagattactccaactgctggatacagaggataccaaagaattggagtaaattttacgagtgggaaacaagatatgcacgaagccattgattgttacagagagttcaagcaagggaaacatggggacatcggaaaggtcttggaagggccaaaccagtggccaggaaatcctcaagagtacctgcccgggcggccgctcga

SEQ ID NO: 90 - DNA, 474 bp, Arabidopsis thaliana
gtggaatcactcataaagtgtaacctcaaatccttggcttgtgtctctgaaagattggctgctcaagacattaccaattccatcgcaactttctgtaacgcttccaatggatacagagagaagaatcatacagaaaccaacctttgaagatttggctagattagtcccacgaacaaactcagtgaaggaaatttagattcatagaagcacgtgtgatcatgcttctctgctgctttactcagatcagctccatgggccattttcgagcatgcagtcaaagttttgatgtaatttgttttctggtgtttgttggacagtgtctgtatttacgcaccattgttagaaaaaacagagctaggtagtatctatattatcaccaagagtcgttgcaggaacattttccgtctctgaaatgatgaacccttgccccttcttgtaaaacaatctcacggtttctcaaaaccgacatgtatt

SEQ ID NO: 91 - DNA, 474 bp, Arabidopsis thaliana
cgtttactcattgaggagatacaacaataaaacgatacagactcaaacatagagcaaaagaagaaacttgtcgctctattttaagatttttttcttacaaaactaaaatctacaaaattactgaagccactaaaacgaattaattatgatttgaccccataactttctaaacttcccaaaacacacccttttaaccgatttttgaaatcaaacttgctctgagctgttcttgcgtatagatcctaaaacccatcttcaccgtcgcttgttgaatcatcaaatcgttaaccaccgacatactcgcgtgattcacttccaactccaaatccatcaacgccgacatcaacctcgccgccggatgattcctcttactagattcaactctaatcattgcgtcccaaccaattatcttcacttcaatctccatccccaccggtttaatcgaagaacacgaagacgacatatctcctccac

SEQ ID NO: 92 - DNA, 474 bp, Arabidopsis thaliana
aggcgacactccggctgcagatgcaaatgatgctgtcactattccacggcctattcctactattccacctcctcccggtcggcgtactttaccttctgagttgatccctgatgaaaatacaaagaatgctcctaggtatgacggggtgatatttgaagctctctctgctttagccgatggtaatggatctgatgtcagttccatttatcatttcattgagcccaggcatgaagtaccgccaaattttagaagaatccttagtacaagactgaggaggcttgcagctcagagcaaacttgcccacgcgtccgcggacgcgtgggcctttgccaccaactttgttcccggaaagtgagccaagttctatctgtttgtaatttacttttctttcaatcttttgaattcgagtgagagacaggaggagaaagagtaggtttgtgtttgtggtggatggtagagactttcagatgtaaa

SEQ ID NO: 93 - DNA, 474 bp, Arabidopsis thaliana
  misc_feature (1)...(474): n = A,T,C or G
tttttttttttttttttttttttttttttcatgtgagtttatttttcaattggggttaagctctaaattttaaagcttcatttggaggaaacaatgaacagactcacctgatatntcttttggtcagattgacctttattatgtgctaagacaaaaaaacgcaataacaacataacaagcttcgcacgtaattctagatcttctctttttgttttaggccctttgctccacgtaagatcccgagagtcctgaggttccaagaacagtaacctttccccattcagannnaagcccgnnncatctcatcttcaagtggatcatcttagtccccaactccatctcaaccttcttcttcaagtagacttcttcaggttcaaaggagtctagatactcagcatacctctgataagcagtacgcagcgcatcggttatatcatttggtaaaggcttcacaccctccccactcattccaat

SEQ ID NO: 94 - DNA, 474 bp, Arabidopsis thaliana
ttttttttttttttttacacactacaacagtttcatttttataaattcaaagtctttttcacatagttttttgaccaacatagtcttccatatcaggaagatcattgtacaggaattatggagataacaaattagacataaagatcacaaccatcaatgagatttcctactcgttctaggtaacaacatgagaattatctctgatttgagacgtaagagatgaaaaagatggccagatatttaaaaaacccggtgcaggcgaaaaagagcaatcatactcctaaacgtaactacagcaagctgacttctcggctgtagaagacgatgcggcagtatcttgtttagtgatcttgatgccttggggctctgccttcgtgtcggtttctgtcaatctttgttttatgtcttttgcgattgacatgaaaacattttcgacattgaggtttgtttttgcactcgtctcaaagaatttga

SEQ ID NO: 95 - DNA, 474 bp, Arabidopsis thaliana
gcggccgctatgtattgtacatttttttatgcatcaagctaaatgttctcatcacccacaacattagtgttgttgcgtctcgaagacttaatgttccaacgagaccaaaagagatagctaagaaagttcaagagactaagaaccgctaaaagccagtaaaatagatcgagcctgtccttatttaggtcgttctccccgagccaccctttagagtcgactgacgtggaagtgatcttgtttacgaccgaaacgagcaccgagctgaagtaaaacccaaaggagtaggaacaataagtcaatgccatcaagaatgattccatgccctttgcagattgcttgtaaaaaaactcgattaatccaacagctgtaaacatctcggagataccaaagatcaagaactgtggcgtgatccagaagatactcaagattctaccgtcaagaaccgaagagtctctacgtttcttctcgagcatg

SEQ ID NO: 96 - DNA, 474 bp, Arabidopsis thaliana
  misc_feature (1)...(474): n = A,T,C or G
aatgactttttagttaaaatttgataatattacaaagtatggttacatgcagttgatcgataattcagaaccaaaaccaaacttctcttaaaaataaggaaaataaaaagaatcaccaaatggttttctccgagaggagtttctgaagcaagattacgagattttgttcgtacaggtgacaataatacgagtgatatggacccaaaaaaacctctctttcttctataagaactacaaagatttcaacttgtctcatttacctgaagaagcttttactttctcagtagaggctaaaaccaaagaaagggctgatgacaattcccaatccaagaccaatagcnncaagtgacgaaacccaagttagtttctctgtgatccttggaactttctctttcaaagcctcactgcaagacccaataaacgctgtgtaacttcccatcgctataactgtcccaaccagaaacattatcaaaa

SEQ ID NO: 97 - DNA, 474 bp, Arabidopsis thaliana
tgacctgatctcgagtatgcatttgtccaccaattcaatggcttcttcaacagacatgtcgctgcggtagtgtctgtccattgtagagagagagaagtatgagccgtatccaaatgctcccttatcaaccttgtggagggttgcaatgtagtcaatgtagtatagagatgcgccggcttctttgtcatagccagccatcaggatgttcaccgaatatggattctttctcaaagcagtggcaagttctccacgagtgaagttagcagcagcagcagtactcaaaggaatcccattacgaaactgatacagtgacacattcttctgaacatactccgtaaactgaacccggtcaccaggctcaccactagcggcgacgagcttgtgagagtcaagagtcatgatcttgtcctctttgttcttgtgaagaagaatactgtgaactgctgatgtatccgccgccacgatagcgaatcc

SEQ ID NO: 98 - DNA, 474 bp, Arabidopsis thaliana
  misc_feature (1)...(474): n = A,T,C or G
ccgcccttttttttttttttttgtataattgtatatcattcatataaatcttaagcttcacttcaaagatgcgactttctcccacaaaacatatttacgtatatatcatctcatgatgttcacttgattaaaaattaacatcacgaatttaacagaatatattattaaatnntccagcaggtaacaaagttataaatggcacacgtgtgggctcatacccagataagctctcgttcctcatactcttaacgctcacaacaaacaatctcacctttcttcttcttcttcttctctctgtttctcaagtttcttaatgcctaggaatatagaaccattggatcttggaatccaaataccatatcatttcagatgtccaatatcactcgaacttatgcaagacccagtcanngtctgcaccggnnaaacctacgaccgagccagcatcgagtcatgggtctccatcggtaacaacac

SEQ ID NO: 99 - DNA, 474 bp, Arabidopsis thaliana
  misc_feature (1)...(474): n = A,T,C or G
atcctctagagcggccgccctttttttttttttttctggtaaataaatatcattatccatatgatgtgaaaatgatgaagatgattttgtctatataacaaattcagtagaatatgatttttgttttgtgaaaccttaagtctataatttgattatattagtagtctatatagattgtctcaagagtcaagtctcaagtgatttgattatgaagatggcaataaaacttacattaatctacatgtagtctcttagctttggagaattaggattggttttcacaggaaccaccttgttgtgtggttgnnnttagttcagggcaaggtgtggggttgaccttgtcagcggctcctacgacatctgagcatttccatattggagacctttttgttccggtcagtgtaacattggagaagcagagattggtgaaaggtgaatcttttaatccctgaaccatgccagcacgctcgactt

SEQ ID NO: 100 - DNA, 474 bp, Arabidopsis thaliana
aagcttgatatcgaattcgcggccgctatttatccgtatagttgttcttgcattgttcttgacttggagggttaaacatcaaaacccagacgctgtatggttatggggaatgtctgtggtttgtgagctatggtttgccttgtcttggcttcttgatcagctccctaagctatgcccgattaatcgtgccaccgatcttcaagtcttgaaggaaaagtttgaaacaccgacagccagcaacccgaccggcaaatccgaccttcctggattcgatgtctttgtctctactgcggatccggagaaagaacctcctctggtcactgctaataccattttatctattcttgctgcggaatatcctgttgagaagctttcttgctatgtatctgatgatggaggggcgcttcttacgtttgaagcaatggctgaagctgctagctttgccaacatttgggttcctttttgtcgtaaaca

SEQ ID NO: 101 - DNA, 474 bp, Arabidopsis thaliana
  misc_feature (1)...(474): n = A,T,C or G
ttttttttgactgaagaagacttttaccttatagaatagcgactagtttcagacaaagatattgacaatttcacaacatatggctacagggctttctatgacatctttttgttacataatatgagacttttgatgacatatccatggatatacaaaatcagagcttgtgcagaattagatgagctccgaattggggacgagtggtcatgactgtttgaggcgcgtgaacataagnnngagagagctcgaaggagaacttttgtagaatcaaagccattgccatctttgcctccaacatagcaaaattctgaccgatgcaaatcctaggtccccatccaaaggggaagaaagagacctggttctttgttgcctttgagagcccgtctctgaaccgctcgggtttaaaatccgctgcatcatcgccccaaagctcggtgtcacgctggacaagaatagttggtaagtaaatttgaa

SEQ ID NO: 102 - DNA, 474 bp, Arabidopsis thaliana
  misc_feature (1)...(474): n = A,T,C or G
tatttctcagagaacattcacctatatgtctttcttcaaggagaagtcttcctctttccagatttagatgaacactcttcagatgccttgtgccttattgatccagattcgaagtacccaactttactctctagacctttttcatggcagccactcccacacacttctctgtctcccatgatcctttttcttccacgtctctccttaatctccaaactcaagcgatctttggtcccaatcacagtttaaagacaacccagttgagaattccagcttctttcagaagaaaagctacaaacttgcaagtgatggcttcaggaaagacacctggactgactcaggaagctaatggggttgcaattgatagacaaaacaacactgatgtatttgacgacatgannnnncggttcctggccttcaagaagcttaagtacatggatgactttgaacactacaaaaatctggcagatgctc

SEQ ID NO: 103 - DNA, 474 bp, Arabidopsis thaliana
  misc_feature (1)...(474): n = A,T,C or G
aagatggctacgaacattgggatgatggattctgcatatttcgtcgggagatcggagattctggcttggattaactctactctccaactcaatctctccaaagtcgaagaggcttgttcaggcgctgttcattgtcagctgatggattcggtgcatnctgggactgttccgatgcacaaggttaactttgatgcgaagagtgaatatgagatgattcagaactataaggttcttcaggatgtgtttaataaactcaagatcactaagcacatcgaagtgagcaaactcgttaagggaaggccattggataacttggagtttatgcagtggatgaaaaagtactgtgattctgttaatggaggccagcataattaccatgcacttgagagaagggaagccagcaaaggaggtaaagaagcaacgaagagagctgcagctacacaacaatcaggcaagagttcgtcttcttcagct

SEQ ID NO: 104 - DNA, 474 bp, Arabidopsis thaliana
  misc_feature (1)...(474): n = A,T,C or G
agatcttctgagtaccctgaggttcagaggattacgagcaagctgttggagacactagaagagtttgtgagagacagagccaagagggccaaaagtcctgagaggaaagagattgaagctcctcctgctcctgctcctcctgtggaagagccagtggatatgaatgagatcaaagcgcttcctcctcctgagaatcacactcctccacctccacctgcaccagagcctaaaccgcagcaaccacaagtaacagatgatctagttaacttgagagaagatgatgtctctggcgatgaccaaggaaacaagtttgctcttgcgctttttgctggccctcccgctaataacggaaaatgggaagctttctcttctgataacaacgtgacatcggnttggcagaatccagcannagagcttgggaaggcggattgggaactagcattggtcgagacagctagtaatctagaacatcag

SEQ ID NO: 105 - DNA, 474 bp, Arabidopsis thaliana
aaccagatcggagcaaagttctgggaagtgatctgcgacgaacacggcattgatcacaccggtcaatacgtcggcgattctccgttacagcttgaacgtatcgatgtctatttcaacgaagctagcggtggaaagtacgttcctcgcgctgttcttatggatctggagcctggtaccatggattctctcagatctggtccgttcggtcagattttccgtcctgataacttcgtctttggtcaatctggtgccggaaataactgggcgaaaggtcattacaccgaaggtgctgagttgattgattctgttctcgatgttgtgaggaaggaagctgagaacagcgattgtcttcaaggtttccaagtgtgtcattcattgggaggaggaactggatctggaatgggaactctattgatttctaagataagagaagagtatccagatcgtatgatgatgactttctcagtgtttcct

SEQ ID NO: 106 - DNA, 474 bp, Arabidopsis thaliana
tggtattgatctcaacattgcatgccggcaattcagcccaaaacgcacaccttcaatgtttcacaccctaaagtacaaagatcctttttacatcattgagttcgcggacaacaatcagctacctcacggtgagaaatggtattgtctgattagtcacggaacaagaccaaaatattggtttgatattgaagtatatcgtcaaggctattatcctcgatgtggtcagctacgctcatggattgctagaaaggatgggatttggtttacaagaaaatatcatagtccaccagggcacgtacttgattggaaaatccagtaatgttctcttgcttttattctccctataattaactaatgtttatgtaagtggtttttgttttgtgtcataataagtaatacgccgtaaaagctaattaagtcatcaacataaattggtggtagactatatggcaacatgttgtatcaaaatatgag

SEQ ID NO: 107 - DNA, 474 bp, Arabidopsis thaliana
aaagaatgtcaaaagattgcggtaaccacggtggtggcaaagaagtagtcgtccggaaactctgcgccgccataatcgccttcatcgtaatagttctaatcaccatcttcctagtttgggtcatactcaggcccactaaaccaagattcgtcctccaagacgccaccgtctacgccttcaacctctcgcaaccaaacctccttacttcaaacttccaagtcacaatcgcatctcgtaaccctaactccaagatcggaatctactacgaccgtctccacgtctacgctacatacatgaaccagcagatcactctacgtacggcgattcctccgacgtatcaaggccacaaagaagtcaacgtttggtctcctttcgtctacgggactgcggttcccatcgcaccttacaactccgtcgctttgggagaggagaaagatcgtggatttgtagggttgatgatacgcgccgatggga

SEQ ID NO: 108 - DNA, 474 bp, Arabidopsis thaliana
cggccgctttttcataaattgttttttgtttgccttgataaaattttattacacagtggatcgtggaaccaaacggccacggttcaaaccacaaaggagattgaagaagggacgtttaggcctcctatgaccgttactaacgccgttaacagtagttaccctctggacgctcgtagtgttaccaactcgtataggagtgacagtgagagaggcagggtcagcggttcgaaggtcaagccaattgatgatgtcagcaaaaacaaggtccacgttacagtcaggctcacctgacgtcagagcgtgccacatccctggatacaacttgagcgtcttgtcccttgtgctagctttctcgtacagagctttgcttacctctggatccgtcactgtatctgcttctccgtgtaatacaaagaatggcattgttatctcgtggagagtgtcttctaggttcatgcttgtcctaagcatctc

SEQ ID NO: 109 - DNA, 474 bp, Arabidopsis thaliana
acggcagctcctcgtcggtaattccttccaccggcggcgaccactcaccctcagatctctcaatcccactcatctctgtaacattctgtacgctttctctctctctttcttcgcttttgtgatctattacggctcggtctctgtgcctcccagctctattttggagcactgcttcgtctctgtgtttatttggctcctttgtgtgtttctctatctctgcttttcttttgtattgctctgtttccgattttatatccatatgtctctggttatttggttatatctatgtgtgattctttgttcttttttccattgaattcaatagctgactaagatctctgccttttatcttcaatagttgctcaatcttttcgctttcgtaacataatttagtttcttgttgatgtttttgatatctaccaatctcttttcaatttatgtctatatgttgctaaatatcttgttcaatgactg

SEQ ID NO: 110 - DNA, 474 bp, Arabidopsis thaliana
catgggctgcggaggcgttggccgccaccttcttcaacacatcgtctcttgccgatcgcttcacgccaaaatgggagttcatatacgggtgattggagtatgtgatagtaaatccttagttgctccaatggatgtgctcaaagaggaactgaatgatgaactcttgtcagaagtttgccttatcaaatcaactggttctgcattatcgaagttgggtgctttgggtggatatcgagtcgtccatgattccgagttaagcacggaaacagaagagattgcaaaacttcttggtaaatctacaggcttagctgtggtggattgctcagccagcatggagacgattgaaatattgatgaaggcagttgacttgggttgctgtattgtccttgcaaataagaagcctgttacttcaacgctggaacattacgacaaattggctttgcatccgcgattcatccgccatgaatctactgt

SEQ ID NO: 111 - DNA, 473 bp, Arabidopsis thaliana
  misc_feature (1)...(473): n = A,T,C or G
aatctcctttataaaccatcacacaagtcaaagagatctccaaacacagattacttacattgaacctgttcattcatactaccaattaaacaccaaatacattataaannntttattatgtcgcctgaaagtatccgtctcagaatcgaatgagatcgtcgtttttggatgaggactgctccttttttgggtcatgatctggattagtcgaagaatcacagccgtttttcttaccgaatatcatctcatcaagatcatccatcatgtcatctccactaccaccccctccatggaatccacctcgaacaccagaagattttctaaccagagattcttctcttccatgaattggagagtcatcgggctcttcagcaacgggaatcatggctggttcatgtgaggttagcggtgcagaggnnntgttcatctcctcatacttagacagcgttttcactagctcgtcgttcacattc

SEQ ID NO: 112 - DNA, 473 bp, Arabidopsis thaliana
  misc_feature (1)...(473): n = A,T,C or G
cgactttattgctatatatgatactaatatgtaccaacaagatttattctaagaatacaacacagacttnnnttggaagaaaggcaaagagaagagacgatctatacaaagacgcttaagaaacttaattcaaagagcaataatcttctcgaaatctgattcatcttcaaaatcggatacatgatgagagtaagaccatgaaaacgacttactactccctctcctaatccttctctgtgaatcgttgccgctcctaaaccgctgccgaaacacgaaataacacatacttgccaatgtccctaccaagatcggtgctccaagcaacgttatggtaatcgccatccacgagttcccctttccaacaaccgcaaatgcaatcgccaaaaatgctccgaatgtgcaagcacaagctgcccacattagcttattcactacagacacaactttcttctgcgcccgtgtgtcccacgcca

SEQ ID NO: 113 - DNA, 473 bp, Arabidopsis thaliana
  misc_feature (1)...(473): n = A,T,C or G
caagttgttgtctctctccttcaacttctgcaaatcttaggcttatctctgaatatctctcttgcatctccttcagttctatctccatcaatccattttgctctcttagcgatgctacttcattcaccaaatctcgaggattgtcactcttatttaatggcaatacttccttgttttgcatagcaatcgcttctggaccttgatgagtttcaccagtctcttggctattttggagtttagtcagcaactcttcgattctgttttccaaatcctcttccttttcgatgaacatctttgaagaggcttccaaagtattttcctttagtttgatttgttcctccagctcttgaattctatcttcgttgcttctttgctcggtttttgttatgttgtcagctgctnnnctgttttncagatttgtcatttcttcttctttcttcttcagctcgcttctcacttgtacctcggccgcg

SEQ ID NO: 114 - DNA, 473 bp, Arabidopsis thaliana
cgcccgggcaggtaccgttttagatcgattaatctggtttgttatgtttattgtggagatttggttcggtttatattgggtagtcacacaatcttcccggtggaatccggtttggcgatttcccttctccgatagactctctcggagatacggaagcgaccttccgaggctcgacgtcttcgtttgcacggcggatccggtgattgagccgccgttgttggtggtaaacacagtcttatctgtgacggctcttgactacccaccggagaaactcgccgtttatctctcagatgacggtggttctgagctgacgttctatgctctcacggaggcagctgagtttgctaaaacttgggttcccttctgcaagaagttcaacgttgagccaacatctcccgctgcttacttgtcttccaaggcaaactgtcttgattctgcggctgaggaggtggctaagctgtatagagaaatgg

SEQ ID NO: 115 - DNA, 473 bp, Arabidopsis thaliana
cggccgcgtttttacagcagaaagttggaaataaattggacaaacaaagaaagatccaaccgaagaaggaaataacaactctctctgggtgtgtagagcaaaaaacgagtctaacatgttttaaaatctttcataaaaacttataaaagatgagcaatcttcaaaagaagaagagacaggtttgggctaaagaagagtgctgtgatgttgaaaatccagagataacctttttcattcattcccatggagattgagaccaaaaaaattattattactcaacgctgtgttggcctgggcctggagcttccaaatgtggatcggcgatcatcactgcctctaggaccagaaccccaacggtctcctccttcagctggaggtccagatctttccctattactagtccaccggtcagtattctgagcggctcctctgttgcttccccagtggtcatctccgggaggcggcccacggtt

SEQ ID NO: 116 - DNA, 473 bp, Arabidopsis thaliana
ctttgaatttttcaccctcactttcatctatctcaaatctccttccagaaaagcgagggaatagtgttgttgagaggtttgtgatttccttttgaaaaaatgatggcttgtggcttaagcaagagccttggcttgtcttcctccttgaagaagcaacaaggcatagtgagtatccttggtggcatttcgtcgaacacttcatctgcaccttcacttaggcgaacttctccgccgatttgtcctccaagacttgggtttcccaaaatgggttttctcctatgaagagaatctcttcctctgagaagcttcgtcctgacgaagaagaagcagaggaagaatcaagatccggtgtcgatatctgggcacagattcaacaagacaagaacgataagaagaaagaggaagagatcgagccgggtcaatccgatgtatggagctcgattttgtctgagaagaagaagactgaatcgagc

SEQ ID NO: 117 - DNA, 473 bp, Arabidopsis thaliana
gtgatcgttggaggggctcatccattacatcgtcatgagaagttagctatagctgtctcaaaagccatgcgtgggcattcccttcaggaaacgaagaaggacggaagatttcatgtgcataccaaaacatacctagatggtgctatcctcaaagaagagatggaaaggtcgactgatgttctagctgctggtttgctcgacgtgtctgaccctgggctttctaataaatattttctccgccagagctgggatgatgaatctgaaggttcgagtaattccatagtaaagcacaggcctctctggtcatcttatagctcaaaacttcagaagggaaagaaaaagaaggcggttaagaaaaaaggcgatctctaccgcacttatggaacaagagttattccagtgtttatactctcattagccgatgtggatccaatgctcatgatggaagatgagagcctcgtgtgggcgagcag

SEQ ID NO: 118 - DNA, 473 bp, Arabidopsis thaliana
ttcactccgtttcatgtcgtctttatcaaccgcagctatggcggaatcggagaaatctcgttctagttggattaagcaattgaatgcatctctagatgaaatcgatcctgaagttgcggatattatcgaattagagaaggctagacaatggaagggatttgaacttataccgtcagagaatttcacttctctatctgtgatgcaagccgttggttctgttatgactaataagtatagtgaaggataccctggagctagatactatggaggaaatgagtacattgacatggctgagacattatgtcaaaaacgcgcattagaagcttttcagttagatccttctaaatggggagtcaatgtgcagtctttatcaggatcaccagctaatttccaagtttacactgcattgttgaagcctcatgaaagaatcatggcacttgatttacctcatggtggacatctttctcatggtt

SEQ ID NO: 119 - DNA, 473 bp, Arabidopsis thaliana
ccacgcgtccgtgagatcccaattacaatttcgcaaggctttttgcaatttccatctgtcgctcaccggaggaattagaacgtgctccgaatctcttctcttccccaaatagattccgatcgattacgcaaccaaattctcggcgtttgaatttttttttccggagaacaggtggtttcttcttctccaggaagatttttgattcttctgtcggatgatttctcagtgaaaatcatggaatcggtatcatcacgcggcggagaccccgtcgtaaaaccgtcgatggaggtctggcatttccagattgctgtctatttcgctttcggattcttcttcttgaggcttgtcctcgatagatacgtctttcaaaggatagctctttggcttttgagtactggttctgctccgattaaattgaatgatgctgctactcgggcaaaaatcgtcaaatgcaaagagtccttgtggaaatt

SEQ ID NO: 120 - DNA, 473 bp, Arabidopsis thaliana
ggaatttccaagttgttgatgagaatgtggaacttgtcgatcggtttcttagcgaagaagctgatcgagtttatgaagtcgatgaagctgttactggaaacgctaaaatctgtggtgaccgtgaagctgagtcctcggctgcagcctcgtcggaaaattatgtgatcgccgaggaggtgatcttagttcgaggacaggacgaacagagcgactcggctgaagctgagtccatttcttctgtctcgccggaaaacgtggtagcggaggagattaagagtcaaggacaagaggaagtaacagaattaggaagaagtggttgcgtagaaaacgaagaaagtggtggagatgtcttagtcgctgaatctgaggaggttagagttgaaaagagtagtaatatggtggaggagagtgatgctgaagcagagaatgaagagaaaacagagttgactattgaagaagatgatgattgggaa

SEQ ID NO: 121 - DNA, 473 bp, Arabidopsis thaliana
ttttgattctctctttggttttctcggaaaaatgtctgcgatactccaaggagctggagctgcaacggctctctcgccgtttaattctatcgattccaacaaactcgttgctccttctcgctcttctctttcagtgaggagcaagagatacattgttgccggatctgatagtaaaagctttggttctagcctcgtagctcgtcgctctgagccgttgataccaaatgctgttacgacgaaggcggacactgctgcgagctctacttcatcaaagcctggacatgagctattacttttcgaggctcttcaagaaggtctagaagaagagatggacagagatccacatgtatgtgtcatgggtgaagatgtaggccattacggaggctcatacaaagtaactaaaggcctagctgataagtttggcgatctcagggttctggacactccaatctgtgaaaacgccttcaccggta

SEQ ID NO: 122 - DNA, 473 bp, Arabidopsis thaliana
tttttttgaagtaaaacgacacggcgtttcattcccacatcaaaaaacgacagtgcttgtatttggacccacggaaggtccaataataaatgggcttttttacgagcaaacaaacaaactaattagaaaacaacagcacgtgaagtcgagaggctattctcgtctttgccgttcccggttaagcatcacctcgaccattagatcattccatgaatcaatcggaccgggtaagcaccaatgaagacaatcgttctgaacctgattcagctccttgttcttcagcccagcgaaaggatttggataccggtacggtcccggatgtccatctggtcggagaagcgacattgaagttgtgtcaagtaatacaatgtttgaattggaaccttcttgttgtgtagtagtagtcttatagaactcttcaagctcgatatcacgcatcgatacatcctcgctcttcatctctccttcgctgc

SEQ ID NO: 123 - DNA, 473 bp, Arabidopsis thaliana
tctctgctctgctcccaaatgttatcgtcctccggaagctccctcttatggcggagccgtacacatgtgcctgcaccgccgcctcggtcttcgccaccgcttaaagctctctcctttcccttctcttccagtttatggtttattcacagaaccacaatttcccctctttcgtgttcagctgaaagttcctcggagattgccctggcgcagagccagcctgcccctgatttcaatccctggtcggagttcgctcaaaatgtgtctggcgaatgggacggtttcggagcagattttacatgcgaagggcaaccgctagaactacctgaatcagtggttccagaagcctttagagaatgggaagtgaaggtgttcgattggcagacgcagtgtcccactcttgcccagcccaactcactatcctttctttacaagtccatcaaactcctccccaccgttggatgtgaagctgatgc

SEQ ID NO: 124 - DNA, 473 bp, Arabidopsis thaliana
  misc_feature (1)...(473): n = A,T,C or G
tggagtttcgtggagatgccaaccagaggattgctaggatttcagctcatctcactcctcagatggaggccaagaactctgtaatcggacgggaaaactgcagagctaaaggtggtaatccaggattcaaagtagcaattcttggagctgcaggtggaattggacaatctttatctttgctgatgaagatgaaccctcttgtctctttacttcatctctacgatgttgtcaatgctcctggcgtcactgctgacgtcagtcatatggacactggagctgttgtccgcgggttcttgggagcgaagcagcttgaggacgcgctaacgggtatggatcttgtgatcataccagccggtataccgaggaaaccagggatgacccgcgatgatctgtttaaaatcaatgctgggattnntaaaacactatgtgaaggtgtagcaaaatgttgtcctaatgctattgtcaacttgatc

SEQ ID NO: 125 - DNA, 473 bp, Arabidopsis thaliana
gccgcccgggcaggtgaaaaattcatttcacttttcctataacaattcaagattaagctatgggttatgaaaccaaatcgactttggacaccgagagatcgaccgcgccaggaaccgccaccacgacgaagagttgttcgatgactcaagttgtcctaagatttgttctgtttgcagccactttgacatcaatagtggtaatggttacaagtaaacagaccaagaatatattccttcctggaactcccattcgtattcctgctgcagagttcaccaactcaccggctcttatatactttgtggtagcattatccgtggcatgcttttacagcattgtatctacatttgtcaccgtatctgctttcaagaagcattcctgctctgcggttctcttgctaaatcttgccattatggatgcggtgatggtggggatagtggcctcagcaaccggggcaggaggtggagtagcttac

SEQ ID NO: 126 - DNA, 473 bp, Arabidopsis thaliana
tttttttttttttttctataacactacgagattattagcttttccaattgtgaggggagacgaaagaagttttacactttccagttttcaccattatcatcttcatagaaagtttgaacacaaggatatgaacttaaacaaaacaaacagagaagacaacatttgaaacacagctctgctctttttcttgttccgcagctacttattcagatcaaattccgaaaacgaagaagctttcttaatgagggaagtagccagaaacctggaagaagctttctagatggcgattccaagggatttcttgaacttctcaacctctagatagatagttgagtaaggcaagaactctgagaagtaatctccacttaggtggttaatggcaacagcaagtttcgggatctctaaggtttcttcattggtgagtgttcgaataaaccttgctggattgcctccccatagttcaccagatggga

SEQ ID NO: 127 - DNA, 473 bp, Arabidopsis thaliana
acgttgttgctggacgacgctccgctgagattgcgcctccgtcgcattgttcctccgtgtgggaaagccaattctcgggtcgggctggtaaacccgtacccggtttggttctggcgatttgaaagagtttggtaaagtaagtaacagccacgtcaggagaataactaaataaaggctgcttacgtgtctgtgtgtggttggtttgtttgttgtatgggttaaaaaggattttgttgctgttttaaacgcggtgtgggcttctggggctacggtcgcgtttggctgtcgctagtttttttttttttttttaagttgtttgtctgaaaattcgtgtgggtttgtgttttttagtgggagcaagtatggggaaacccaaatcgacttgttgtcccgttgcgtttgatgtaacgtttgcttatgttataattgaaataaaaaagtgcttttgggaaaaaaaaaaaaaaaaaaaaaaa

SEQ ID NO: 128 - DNA, 473 bp, Arabidopsis thaliana
tttttttttgtcaagaacccatttattttttagccacagtggttcaattatagtatcacgaatttccacataatcttccaaacagaaaactgaaagtttcgcagcacagatatgattgctttaaaggataaagagcagttttgttttagagcaaacaaaagctcatttagtagctgtcaatgtcagtttcaggccttctcaggaagtaacgcagacagttcaccaaaacctgtgacaaagatctgtttagagcttgcccttggtagcttacgtgaaacttgtctttcgcaaccagtccctctgtatctatctctgcggattccacgtctatgttgacatcagccatcactttgatcatctctacgacaagacctggcctgtccgctgtctctatgacaagcaggctcctctttggtccatcttctttcacatgtatatgagttgcgatatcgacatcaatcttcttttcggga

SEQ ID NO: 129 - DNA, 473 bp, Arabidopsis thaliana
gcggccgccacaactgtaaaaccccaatcacctctttacatgtgacttccttattactctcttcttcttattttcctcctcttcttcttcgctctagtttcccccaacaatcgccatggcagcttcgtctctcaatctcctcctcattctctctcttctcactttcatttctctccagagatctgaatctctttccgataatccatctctcactcttctacccgacggattcgactggccgatctctcactccgatgaattcgatatcatcgacggtgaagaaagcttcgaagttacggaggaagacgacggcgtaacagatcgacggtcattgtactggcggaggacgaagtattacatatcgtacggtgcattgtcggcgaatagagtgccatgtcctcccagatctggaagatcgtactacactcataactgcttcagagctagaggtcccgttcatccgtatagccgag

SEQ ID NO: 130 - DNA, 473 bp, Arabidopsis thaliana
ggccaaaccggttaatcgccaatctgtgaggcacccaagtcacaaccatccgctgcgtgtctttaaagccaaagaagaggatgagaccgcatgctctggctgcgagctagagctgaccgggcaagctttcaaatgtataaagtcagagtgcgattacttcttacacaagtcatgtttcgaccttcctagtgagaccaataacaagtctcaccaggaccaccctctgaccttgcttcattccccaccagatgatcggtctgtctacacgtgtgacgcgtgtgaccaatacggatctggattttcttaccattgctcaaactgcaactacagtcttcatgtgggatgtgcgtttatccctgaaaccgtagatcgtgaagatcatgaacatccactcactcttctttattgcacaccgtgtaaaggacgtgaagacacgtacttcacttgcagcgcttgtgatgaaactatttcag

SEQ ID NO: 131 - DNA, 473 bp, Arabidopsis thaliana
tttctacatctgcggatgctgtgtctcatgtggcaccctcagaaaaggcaccagagaaacctgctcccaagccttctcctcctgctgagaagcccaaagttgaaagtaccaaagttgcagagaaacccaaggcaccatcaccgccacctccaccgccatccaaacagtcagctaaagaaccgcagcttccacctaaggatagggaaagacgggttcctatgacaagacttcgcaaacgggtggcaactaggttgaaagactctcagaacacttttgcgttgctgacaactttcaatgaagttgatatgactaatctgatgaagctccgatctcagtacaaggatgcttttcttgaaaagcacggagtgaagttggggcttatgtctggtttcattaaggctgctgttagtgccctccagcaccaacctgtagtaaatgcagttatcgatggagatgatatcatttacagagac

SEQ ID NO: 132 - DNA, 473 bp, Arabidopsis thaliana
aggaccacagcctacaacaatttcgtgtgaatgtttctttcctgagtttggtaatagagatgacacacgagtgacaatatcctttacaagatgaaaacataatacactttacaacaagcacaaaaacctggatggtttctcattgcacactgtacctatggatatatatcgcaaacccccccaaagttttcggcagtaactggttggtattcacacagaccgtaatgcacatgttatttcttaacagattcgagatcattggcttttctacctgagtcggtcccgtcaagtcgagctcctctccacagtgttgacttgcttgatcttagcagtaacccaaaggctgatgagcatgctgctctcacaactgaatcttgcgaccgggtcatcttgctaaccagcgtttcaaacacctgtgggtagtagagagagattatgtgctgatcctctgagagtgacaacatggtggtgga

SEQ ID NO: 133 - DNA, 473 bp, Arabidopsis thaliana
gttcttcatctgtttcctctaggctatagattgtggcgttacactaaagaagaggcaaaaaaaggaagattttcgatgtacgatatcttcaaaaagcgccatgtaagaggcgaccatggtgtcccattaggtggaattggtggaggaagcatcggaaggagttacaaaggtgaatttcagcagtttaagctcttccctaaaatttgtgaagaagctccaatcctcacaaaccagttctctgtttttgtgtcgagacccggtggcttgagctactccactgttctatgcccaacaaagccaaaatctgtaaaaggtaaaacagaggatttaggaatagaatcatgggactggaacatggaaggggacaaatctacctatcatgctttgtatccaaggtcttggaccgtatacaacgagcctgaccctgaactcagaatagtttctcgtcaagtgtcgccttttatacctcataa

SEQ ID NO: 134 - DNA, 473 bp, Arabidopsis thaliana
acacacacgtgctgtacaaagaagcataagacataagagagatacaacactacacacattatcaccaaccattgatagcttcaagtactcatagaacagctttttgtttttcctacatatttttttttgtttgtgctgttacagttcgagagctttaagagacatgaaacttcttttgtgtttctctttcattttcaatctgcaagaactgttgctccttccaccttgaaggtagctccccaaatttctccctcattagcaggaactgcagtgatcttgttcttagggttctcgaagctcctaagcccacctaatgccgtcgagtaataacagccttgagggaaagacgcaagagacttgccacaagcaccttttagtaagtcaacatcatcagcaaatgccacatagccatcagctgttattccccaatacaatggaaccttgccaacttggtcagaggctacaaacagagt

SEQ ID NO: 135 - DNA, 473 bp, Arabidopsis thaliana
ccaacgcaatcaaattttcctcaaatccgtcgctttcttccttttgatcggtctcgcttaccgttttctcatcactaattccaccgtctctccggttcccaccgttcgatcctcgccggaatctctcccgccggatccttcaggtctcactgccatcactcaaacttcagcctctgtcgattccccagcaaacatcacaaccattgcttcacagaatgtttcaaccaagtgtgatatctttatcgggaattgggtaccagacccatcagggccaatctacaccaatgtctcttgccgtcatatccaagattaccaaaattgcttgaaaaacggaaggccagatgtgaattaccttcgatggagatggcaacctcgcgattgcgatctcccgaggtttaaccctgagcaattccttgacaatatgaggaacaaatggttggcttttatcggtgattccatctctcgtaaccatg

SEQ ID NO: 136 - DNA, 473 bp, Arabidopsis thaliana
agaaatcgatttggttgtctgttaatttgttgggaaataaattgaaataggagattgattggatggtgagaaggcaagaggaggagaagaaggcggagaagggaatgcgtctggggaaatacgagctagggaggacgctcggcgagggtaatttcggtaaagttaaattcgctaaagataccgtctccggtcattccttcgccgttaaaatcatcgacaagtctcgtatcgccgatctcaacttctccttacagataaaaagagagatccggactctgaaaatgttgaaacatccccacattgttagattacatgaggtcttggctagcaaaacgaaaattaatatggtaatggaacttgttaccggaggagaattgttcgacagaattgtttccaacggaaaattaacagaaactgatggaagaaaaatgtttcagcagcttatcgatggaatcagctactgtcatagcaaa

SEQ ID NO: 137 - DNA, 472 bp, Arabidopsis thaliana
aaactatagagattttccgtttcccgctttaatacagtgccccaattcgcgcgacacatagagtgtagagacgctttcacgagcgtttccgacgtcggactttcagctcatcatctccacatctttaacggtaaagattaatcatgcctgaaattcatttgggtgctcatacaataagatcccatggagtaacagtcgcgaggttccacatgcatgactggctcattcttctgctgctaatagtcattgaaattgttcttaatgtcatcgaaccctttcatcgttttgttggagaagatatgctcactgatctcagataccctctgcaggacaacacaattcctttctgggctgtcccgttgatagctgttgtgctaccttttgctgtcatttgtgtttactacttcattagaaatgatgtttatgacctgcatcatgcaatactagggcttttgttctctgtacttataac

SEQ ID NO: 138 - DNA, 472 bp, Arabidopsis thaliana
caataaacacaggagacatcccaaatctcttctcaaaattcttctgcgacatcaacgacgatttctcaagctcatcatatccctcaagcccttcttcaatatcttccaaatcaaaaatcgcctccgtcgatgatcgttttctactatagctgctcatcgttttatcatcactcttcttcttattcttcttctttagtttcgataacaagctcttgattcctgatttcttttttgacgaatctgatttgtgattacggttacctccgccgcaacaacagcagatccacgacggccaacaatcacaggtcattttctttcgtttttccgataccggaggttcatatccgtataatgctggtctattgaatacacatcctgttcctacatagactggtccttggattccatctaagcctctcatgtttatctgttataaacaaaaaccagattttagggttttgaattttgaatt

SEQ ID NO: 139 - DNA, 472 bp, Arabidopsis thaliana
caaaagtcaactgagaaaagcgttgagaatatgaaaggtgtcagatgtaaaagggtgtcaagatctattggctctgtaggtctttatgtgcctggtggaacagctgttttgccatcaacggctttgatgcttgctattcctgctcaaattgctggatgtaaaacagttgttcttgcaactccaccaagtaaggatggaagcatttgtaaggaggttctgtattgcgccaagagggctggtgttactcacatactcaaagctggtggagcgcaggctatagctgccatggcctgggggacagattcttgtccaaaggttgagaagatttttggtcctgggaaccagtatgtcacagctgctaagatgattcttcaaaacagcgaggcaatggtctcaatcgatatgcctgctggtccttcagaagtcctagttattgctgacgaacatgctagtccagtttacattgcagcag

SEQ ID NO: 140 - DNA, 472 bp, Arabidopsis thaliana
ccacgcgtccgctagacaaccacaagaacacaaaacacacaaaaacaaagaggttctttctttgaagaagaaatggaaaaagttgatgtttatgatgagcttgttaacctaaaggcaacagagctgagattgggattaccagggacagaagaaactgtttcttgtggaaaaagcaacaaaagagttttacctgaagctactgagaaagagattgaatccactggaaaaactgaaaccgcttctcctccaaaggctcagattgttggatggccaccagttagatcttacagaaagaacaatgttcagacaaagaagagtgaatctgaaggtcaaggaaactatgtgaaagtaagtatggatggtgctccatatctaaggaagatagatctaacgatgtataaacaatatccagagttgatgaaatcacttgaaaacatgtttaaattctctgtgggagaatattttgagagag

SEQ ID NO: 141 - DNA, 472 bp, Arabidopsis thaliana
ctttttttgtttttttgtgaagaaacagagatttttgggagaaattcgtttcaagatttggaagagaatttgaagtttataaacatcgaatcgagaaatacgaagaatcttcagaagaaggtataggaatacaattgaaagtgatggagatggcgtctggataatcacttccagctaaagaataatcggaaaatctaacaggagaaaagcaattgcaacataagtagaatcgagatttacccaattccatagcaagcaagcaatgatagaaaaatggatgctttctttctctctgattcaacaacgaatcttcttaaaccaagaaagtccagaggattctcgagaaaacagaggaggaagagaaaggttggagcattgttggttctgagttgagattcgatgtgggttttaagagaagaaatctagggtttttatatctgagtagttctcttctctctctccggacgcgtgg

SEQ ID NO: 142 - DNA, 472 bp, Arabidopsis thaliana
ggtcgcggccgaggtaccaactctcaagtctgaaaataaaaatccaaattgaatccagagttgagaacgtatttggtttttcaaactgaattaaatccaaaacacactcaaactcgaaaagtctcaacataaatttaacgacacaaaataaactctcctaaggaaattataaaatgatgcaaaggattcgtcaccaaaggaactccaatctgcagaagaactttgcttcatcttcaaaggtcttgtacactcaaacctggaggaagagactgcttaagcttgtcggctttctcttggtcaaagacgcagagcgtgtagaggtacctcgagcatctgaccttaaacttgacaatatccttgcttctcttgatcttcacagatcgtgcatctttccttctagctgtcagaaggaagtccttgatctcgtggatttgcttaggcattctcgaaacctgcccgggcggccgctcga

SEQ ID NO: 143 - DNA, 472 bp, Arabidopsis thaliana
tttttttttttttagttaaaatgtccctatgattagtacctaaaatagtttaatgttacaaattactgaattcacagagtaatgaaacgaacaaaaatatcccacattggtaccatctttagataacaaatccaaaaagaaacagaaacgatcaaggcttctgcgagatatggttgacaacgagcacatactcttcagtcgatggtaagatgacgtgctaagtcagtgtgcagtgcatgacccgccttaaatgcaattatgtgagccacggggagtcctccatttccgccccgtgaaacgagggagaggtcaccgattaggtcaaggatcttatgtcgacatgcttcatcatcaaaccgcagaggaggattcatccatccatgctcggcgctacaaacgatggcattatccagagaacctcctttaatgagccctgcttcacgcatacgctccacctcttcatagatacaga

SEQ ID NO: 144 - DNA, 472 bp, Arabidopsis thaliana
ggtcgcggccgaggtactatagagtcgactatacttgaggacgcattttcttggaggaaatatggacaaaaggagattcttaatgccaaattcccaagaagttactttagatgcacacacaagtatacccaagggtgcaaggcaacaaagcaagtccagaaggttgacctcgaacccaagatgttcagtatcacatacataggaaaccacacgtgtaacaccaacgcagaaactcccaagagcaagacttgtgaccatcatgatgagatcttcatggattccgaagatcacaagagtcctagtttaactacctcaatgaaggaggaagaagacaatcctcatcgtcatcatggttcgtccacggagaatgacttgtcattggtgtggccagaaatggttttcgaagaagattatcatcatcaggccagttacgtcaatgggaaaacgagtacctgcccgggcggccgctcga

SEQ ID NO: 145 - DNA, 472 bp, Arabidopsis thaliana
tttatgtattaagtattaactattaacgttgacttaagtcaaagtgttctacaacagagattcttcaaacgtagattgaagaacacgagaaaggaagactcgaaaaaccagagggagtgttgacgtggctccacttcccgccattcttctccgccgtcgtcttcaccatcatcgttccactttcttcaccaccaccgccaatcattgccaccgcttggccactcaaacttccagcaaaaaccgaagtcatcgtcgtcaccggaagccgaatcgtatccataattaccttccatttcatcgaatcgtcttcaacttcccaatgaggctgactctgtctctcgctatcaataaaacaccataaccgacaacctctaaaatctccggggaattcagcagcagccgcggcggtgcgacctctcggactcaaatcgggaaacggccagacattctcgattgtcgaccatgaattcgt

SEQ ID NO: 146 - DNA, 472 bp, Arabidopsis thaliana
ctagagcggccgccctttttttttttttttttttttttttgagcaaagttttttttttcttttctgatgagtgagcttctaaataagtgaagagtgtcttataatttgtagaagactaaaatgtgcccacatagactgagattaacccagagtaaacacaactcagattcgattccatcatcaaatgaaatgataacaactgtttttgtttgagatcctttcttgcttccaatggtttctcagttctcactgtgtgttgctaatgtcaccagttacttccatcatttgatcagcctcaagatttgcgtcctcattcttattcacagatagatgctgaggtgtttgcggaggagggactttggataggtctctaagagtccccttgtttgcccacatcagtccacacgcattacaaagtgttcttggcccatcaggtccacgtcgcatcattggagttgacttctcacttgtt

SEQ ID NO: 147 - DNA, 472 bp, Arabidopsis thaliana
  misc_feature (1)...(472): n = A,T,C or G
tttttttttcaattcataaaattgctttcaagacaactcagaaaatcagtaatcagctttaaagccttacaaagagagtagattatcaaaatatagactctttcttatggaaaattacaatgaaactggtgattaataccnnnaacaaatgaaagatctaagaaagtaacaacgcattacacaacaaatggcaccaaaggattaagcagagagatcttggaattgccaagggttgaattgggtcaacttcacatcggttgtatcctcagagttttcagctgtggcgcggtgcaccgagtactttccattgaattggtaaacttcgagatcaccccatggtgtaggagtgacttcttctgtttcatcaaaccattttggagcaaatttttggcctttctcttctctgcttttcttctcagctctttgtctatcctctaggctgctcttttcgaatccagatttggacatatca

SEQ ID NO: 148 - DNA, 472 bp, Arabidopsis thaliana
gcggccgccgaaacatgcgtgtggatacgaaagatctctagattcctccactcctcaatttctcatcttttgcttcgtcgtgactcttcttgatttcatcaataatgggttctgttatgagtttgagctgttccaagaggaaagcaacgagtcaggacgttgagtgttcaagcgaatctcgtaaaagacgaaagatatcttcagagaacgatgaagaagagtgttgtagattgattccaagtcttcctgatgagttatctatacagattcttgctaggcttcctagaatttgttactcgagtgttcggttggtttctcggaggtggagatcggctgtttcgacttctgaggtgtatagtttgaggaaagaacttgggaggactgaggagtggctctatgtgttgactaaaggtcatgaggataagcttttgtggtatgctttagatcctgtgtctactaaatggcagagatt

SEQ ID NO: 149 - DNA, 472 bp, Arabidopsis thaliana
  misc_feature (1)...(472): n = A,T,C or G
cttgatatcgaattcgcggccgctacgaagcttctttatttgcttaaccanggggagtcattcaccaaggttgaagcaacggaagnnntcttttcagttacaaagctttttcaatcaaaagacacgggtttgaggagaatggtctacttgatcattaaggagttatctccatcatctgatgaggttatcatcgtaacaagctctctgatgaaggatatgaatagtaaaattgatatgtatcgagcaaatgctatccgtgtcctctgccggataatagacggaacccttctcactcagattgagcgatacttgaaacaagccattgtggataagaatcccgttgtttcaagtgcagctttagtcagtgggcttcacttgctcaagacaaacccagaaattgttaaaagatggagcaatgaagttcaagaaggtattcaatccagatcagcccttgttcagttccatgccctag

SEQ ID NO: 150 - DNA, 472 bp, Arabidopsis thaliana
acagcttttgttgttcttccttgagcaatagtgcacgtagaatcgtatcgcaaatgccatcgtagtgtacgatcagatgtccgccttgggggatttcgtggtagttgatcaaaggttgtttctgcagaatgcatctttgaagttgaaatggaacaactttgtcttccttaccatgccagatgtgaatatagctctttgtactgatgcttagatccgcgggttcgaagtcccattgcccgaaacaaaccataaaatcgtcccttagagtatcgaaaacatttctttcccgtagcttttccttagtaagcatgggaaaaccagtttttcgcttgagcacttctatgtcgtggctgttgaagtagaccggattgctttcaaggaccgaactagttgaagcgaagagcttttgaatgatccaccaatgtaacagtccaggtgcatattttgatatcctcaaaccccatttgataat

SEQ ID NO: 151 - DNA, 472 bp, Arabidopsis thaliana
aaccgcccatgcgggaatcgaagctagcaacggtgtgaaaaacatcgctaacaagaaataaacagccaccgtaatcgccgttagacccgtcctccctccttctcttatccccgtcgacgactcgatgaaaacagtcaccggagatgtaccaagcaacgatccgatcacaatcgcagacgcgtcagacataaacgcgaaatactgtccggcgaaatctcctttctcgtcgacgaatccggcgaatctagccatggagtaaagcgttcccgtcgtatccaaaatatcaacgtagaggaatgtcaccagagcttcccagaaatgtcctttgtttatcccggagaagcttaaagctccggcggtatgtttaatgacgtgtacatcaacgatctttttgaaataatcatgagctgcatctccggccgatgtgttcggaaacgccgttacctctgtgttacggaaccacgaaacggcc

SEQ ID NO: 152 - DNA, 472 bp, Arabidopsis thaliana
ataggaaagggaaatggagaagatccgcatttattcagcagcaataacttcgtcggacgtcaaacatggaagtttgatcacaaagccggctcaccggaggaacgagctgccgtcgaagaagctcgccggggtttcttggataaccgttttcgtgttaaaggttgcagtgatctattgtggcgaatgcaatttctaagagagaagaaattcgaacaaggcataccacaactaaaagctactaacatagaagaaataacgtatgaaacaacgacaaatgcattacgaagaggcgttcgttacttcacggctttgcaagcctccgacggccattggccgggagaaatcaccggtccgcttttcttccttcctcctctcatattttgtttgtacattaccggacatctggaggaagtattcgatgctgaacatcgcaaagagatgctaagacatatctattgtcaccagaacgaag

SEQ ID NO: 153 - DNA, 472 bp, Arabidopsis thaliana
  misc_feature (1)...(472): n = A,T,C or G
ttctcgagattttgaatcttttcagctaaaaaagatcacagctttttgcgttttctggatgagtttgagataagagaagatgaagattcagtgtaacgtttgtgaggcggcggaagcgacggttctatgttgcgccgacgaggctgctctttgttgggcttgcgatgagaaaattcacgccgctaataaactcgccggaaaacatcagagagtccctctctctnnntctgcctcttccatacccaaatgtgacatttgtcaggaagcatctggattcttcttttgtctgcaagatagagctttgctatgtaggaaatgtgatgttgcaatccacactgtgaatcctcatgtttcagctcaccagagatttcttctcactggaatcaaagttggtcttgaatctatagacactggtccttctactaaatcctcacctaccaatgatgataaaaccatggagaccaaacctttt

SEQ ID NO: 154 - DNA, 472 bp, Arabidopsis thaliana
cccaagtcatgtgagctatggaaatcatcatcatcatcatctagaccgatcaaaactcagtcgtttcgaagagtttatagcgcaaacttagatccattctccgacgaagagttctcgaaaaaaatccaagagctaactctcagattcaatatcccacaccatgacgacgacgagaattcaatcgagccgccatggaacgagatggttcatttgtcgagtattgaaatgaaagcaaacagtgttgatcttcctctttcacttcgtattataaagaagaaacgtcaatgggaagaaggagttaaacaagctggtgaatctgcgtgttgctcgatgaataaagctttttcttcaatggtgtttatgatacgggagcttcagagctttactttacatatgagagagattctgttctacgaagacttgcaagagattttgctaagagttagagaagagatgcaacaatctttcgttt

SEQ ID NO: 155 - DNA, 472 bp, Arabidopsis thaliana
agaagctatagttctgtatcctgcaccaccaataggtcacttagtgtccatggttgagttaggtaaaaccatcctctccaaaaacccatctctctccatccacattatcttagttccaccgccttatcagccggaatcaacagccacttacatctcctccgtttcctcctccttcccctcaataaccttccaccatcttcccgctgtcacaccgtactcctcctccttcacctctcgccaccaccacgaatctctcctcctagagatcctctgttttagcaacccaagtgtccaccgaacacttttctcactctctcgaaacttcaacgtccgagcaatgatcatcgatttcttctgcaccgccgttttagacatcaccgctgacttcaccttccctgtttactacttcttcacctctggagccgcatgtctcgccttttccttctatctcccgaccatccacgaaacaacc

SEQ ID NO: 156 - DNA, 472 bp, Arabidopsis thaliana
gtcgccaaccaccagttcacagttgtagaaactgattccgcctacacgaaaccattcaccacaaatgtcatcatgatcggtcctggccaaaccactaacgtcctcctcacggcaaaccagagaccaggccgctactacatggcagctcgagcctacaacagcgcaaacgccccgttcgacaacacaaccactactgctatcttacaatacgtcaacgctccaacaagacgtggccgtggtcgtggtcaaatcgctcctgttttcccagtcctccccgggttcaacgacaccgcaaccgcaactgctttcaccaaccgtctccgatactggaaacgagctccagtaccacaacaagtcgatgagaacctctttttcaccgtcggattagggctaatcaactgtgccaacccaaacagtccccgttgccaaggtcctaacgggacccgattcgcagcaagcatgaacaacatgt

SEQ ID NO: 157 - DNA, 472 bp, Arabidopsis thaliana
atgacgacgattgttcccacctccgaagaagatccttacctcgccattgttcgtttcacttcccagcttgcctgggctgatgctggtcccgaggtcgcagagcctgaagtttccaggctatgtaaggaagcagaggagtctataataaatgggaagtggctggatttggcaacgttgatggtaacttcagctgacttggtatcagccaaaatctctgagaaagatcttgagtgtacctacaccatcatttgcaaccttgtcaagaatgcgaacagtcctgaggaagtccttgaaatggtgaaagctatagctgctaaggttattcaacaaccaaacgacaaagcttcattgcgtttgaagatcctcttcaatctatataatctggtagaccacccaaatgctcgttttcaagtatacatgaaagctctggaactggctgtaaacgggaaggttaccgagtatattgtacctt

SEQ ID NO: 158 - DNA, 471 bp, Arabidopsis thaliana
ctttttttttttttttttcaaactgcgcgtattctataccgcaaaattttacaaagatttggccactcttctcttaagtggaaaataaacagaattattccaaaccattaaaaactctgatgagaaaaacagagaatgttacaataactctgcttataatgaatacagacttactaagacctcaatcaccccaacttctttccttttggggcagacaaaaaaaactcgcaaacactaatcgattgtgagctaagaagacaactagaagtgatcactcagtcactcactcctcactaagtacagtgatcactcagtcactcagtcctcactaaatacaagtctgcttatgaatgggcacatggctgcaagaagtgccttgggacactcctcatgtggcagatgtccgcatcctgagattgctactagcctagagttttcgagttttgaagccatgacttgggaggacttgag

SEQ ID NO: 159 - DNA, 471 bp, Arabidopsis thaliana
  misc_feature (1)...(471): n = A,T,C or G
tttttttttttttgtttttgaaacagaaaatgatgaactttatttagttggatcttcaatatccaagatcaacatcaacaatactgtgattanattatacatcaacaatagaacaatataaacacaaacttattactcttacatctttctttttataatcttttgctcccgagatttttggtaaagagtcagtcttccttcatcaatccactgaaactggcttcatctcctctgcttctttcctcagctcatcgaacagaacagacgacagatatctttctccgaagctcgcatggattgtcacaatgagtttgcctttattctctggcattttcgccagtctaattgctgccacggtgttagctcccgacgatatcccaaccatgagaccttctttcaatgccaattctctagccatctttatagcatcctcactactaacctcaagaacactctccataacatccatat

SEQ ID NO: 160 - DNA, 471 bp, Arabidopsis thaliana
  misc_feature (1)...(471): n = A,T,C or G
ttttttccacgagaaatagtttatacacaaatattgttacatttttaacacaataagcaaatatggtacaaatagatgcgacccgatgacaagtttgacaacagagacgcaaagaacacacagttgttacattggttttattggaagctgtttcttacagagcatagttacttaacaaccagaaaatgtgaaacttgtggggcaaggaaccttttgcatttaagcagaagcaacagcctctgaaacccttccattaccagactctgcactgagactgtcgtagtaatcaaccaacaccttccaaccagagggacacatgaaaccatctggtgggttctctttcttcttcgccaagccacgcatcttggttcctgatatgaagaggaagtcttgagacctggagggatcaaagaagnccattttcccctgagttttgtcatatgcagcgaccttgaagggaagaatgttgag

SEQ ID NO: 161 - DNA, 471 bp, Arabidopsis thaliana
cggccgccgatcaatcacaaattccttcttctctctctctcttttcgtccctaagaatcaattatgaaaggagctaaatcaaagactgaaaccaggagctccaagctctctgtgaccaagaagccggctaaaggagcagggcgtggcaaagctgctgctaaggaccccaacaaaccaaagaggccagccagtgctttcttcgttttcatggaagatttccgtgagactttcaagaaggaaaaccccaagaacaagtctgtagctactgttggaaaagctgctggagacaagtggaagtccttgtctgattctgagaaagctccttatgttgctaaggctgagaaacgcaaggttgaatatgagaagaacattaaagcttacaacaagaaactggaggaaggtccaaaagaagatgaggaatctgacaagtcagtgtcagaggtcaatgacgaggatgatgctgaggatggt

SEQ ID NO: 162 - DNA, 471 bp, Arabidopsis thaliana
aaacatataatgcagtttcaatccctctaccaaattttctgttgatactttcctcattaagggttttccacatagctgattgatgaaaatgtcaatgagcttgtgtggaaacctttgatgtttttttttgtatgtggatgtgaattggtatactcgggtttattcgtaaaggaatgatcattcgattgaataagaatggagctttatactgcaaattgtctgtccaccgaaaacaaacctactcttgagctttcaaaactagtcaaagacgagaaaagctcggtgaaaacgaacagcgaaaacacccttacacttgtgaatcatggtgcaaagatgtggcaagagaacagggaaaaatgggtgggagatcaatctcgacaaagaaaaaacactgcaaaggatcagattataagctggtctactacatatgaagatcttctctcaactcatgaacctttctctgagtcgatt

SEQ ID NO: 163 - DNA, 471 bp, Arabidopsis thaliana
gatattcatggacagttccatgatcttgcagagcttttccgtatagggggaatgtgccctgataccaattacctgtttatgggagactatgtggaccgtggttattattctgttgaaactgttacgctgttagtcgccttaaagatgcgatatcctcagcgaatcactattcttagaggaaaccatgaaagtcgtcagattactcaggtttatggattttatgatgaatgtctgcgaaagtacggcaacgcaaatgtttggaaaatctttacagacctcttcgactattttcctctgacagccttggttgagtcagaaatattttgccttcatggtggattatctccatctatcgagacccttgacaacataaggaattttgatcgagttcaagaagtgccccatgaagggccgatgtgtgacttattatggtctgaccccgatgaccgctgtggttggggcatctctcct

SEQ ID NO: 164 - DNA, 471 bp, Arabidopsis thaliana
  misc_feature (1)...(471): n = A,T,C or G
atgaggacgtggaagtcgtgggaggaagagacaaagacaatagagtatcagtattccaacgatcctgagaggttcaggtttgcgagggacacatcttttgggagaagacatctcaatttctggagcaagacgagagtcacactatggattgtttgtttttttagacagttctttggatctgtcaccaaagttgattacttagcactaagacatggtttcatcatggcgcattttgctcccggtaacgaatcaagattcgatttccgcaagtatattcagagatcattagagaaagacttcaaaaccgttgttgaaatcagtccggttatctggtttnnnnctgtgctattcctcttgaccaattcatatggattacgttcttacctctggttaccattcattccactagtcgtaattctaatagttggaacaaagcttgaagtcataataacaaaattgggtctaagaatc

SEQ ID NO: 165 - DNA, 471 bp, Arabidopsis thaliana
  misc_feature (1)...(471): n = A,T,C or G
acagtctatgcaatcaagaactagcaacaatgcctcatcacttggtggccaaagcatttcaatgccagaggcgctccgaggcagtggaattccggcaacacagccaacccagcaaacactacctggtgctaatatcgctactggacctgctcttcctcagcagcttccaatgcattactctcaacccacattacctctaacacactatgcaaacatgatcggttatcctctaatgcctcagaattatccatacatgccatctgctttccagcaaacatttgctggtaatagtgcataccaccagcaactagctgcatnnnntccgcagtacaaaaccaatgtctctcccggtaatttgcctcagtctgcaacagcgcctgnntctgcttatggatttggaaactcgaccaatgtcggatctgccggaaacttccctcttaaccaacagtctgctactaccggtacaacgct

SEQ ID NO: 166 - DNA, 471 bp, Arabidopsis thaliana
acacacggatcaagtaatctgcttcttcttcgtttttacgatttgatcccaaagtttttcaattctataaatttgtgaaagcgaatcgtttgatttgacttataggttgactcttttctttggaaatggcagcgtcatcatcttctcttcttcttctccacaagcccacctacaatttccatttcgccgcttcctctgttcccacttacatcaattccgctcgatttcgaatttcgagctcaatcttccctttggatcgaagaagaagaagaagaatctggtctgtctctggctttaaatctatggccgatttagtaaaaaccaatgctcgcagagacggtgaagaacgatttcaagcgcttgagcaagaggctttcatcaataattcgtctccggagctccagaacgagttggtatccgacgccggaggtgggattgaagcaatcgctaatcgtctgagcaaatggattg

SEQ ID NO: 167 - DNA, 471 bp, Arabidopsis thaliana
tttaagcaacacttgatccaatcattatatgcatcatatcaaaacgatatgaaacttataataccagtctaggttcgaaaatgtttacgcgcaaagttctaaaaggcgaaagagccaaagtcataaagaaagctcaatgaaggatgggtatagccaatacacgcatccacactggtagcgaatcccttctatgcttaaccatgatgacggttttattggtacggcatgtaacgcataggccttctaaacctaggagcttttccgtatccatatggggaatacatataaggagacatgaaaggtctgcggaaccggtaacccatgtatggattgaatcgtctaccacggaactgtttcaatccaggaacgtttgttctcttctgcaagacctttaattgacgaccatgtagctctgattcattcagttgtagagcctcttgaacagcttccacttcgacgaattctacatat

SEQ ID NO: 168 - DNA, 471 bp, Arabidopsis thaliana
ttttttttttttttttttttttaaaagtggaggaactgaggtaaaatgttaacacagtcaggatcaaaatcttaacggtaaaaatgaaacctctctttctctcatatcacaacagcctgagtacagaacacaaaggacaaaacagaagaagtgaagaacaaaatacaaaacacaagcaatcagagttttgagtatcttcctctttacgtggtttttgtctgaacaaacattaattcagctcctgatttttctggattagatacaaacaaaaagacttttaatccagcaacaatgtccactagaacagccgaggttgttgttgttgtggatttccacttctcatcattgcgcagaactcttcatagttgattctaccatcgttatcggagtcgacatctgacaaaacctctttgattgttgcatcatctcccattccatattccttcaatgcagattccagttcgtctattg

SEQ ID NO: 169 - DNA, 471 bp, Arabidopsis thaliana
gttttcttcttataacagagttggtaaatttaaaatacaacggaatataatcgaaacaatcagtgaaactatagagatatattgatcacttttcaatttttcatgacccaaaacctctcaatttctccagcggttcttcctgggatcctcccagctatcagttcccacctttcatcaaataataacacacaaaattcagcttttactatggtgttacaattaaattattttcctacgaaatagtattcattattagttaaaagatcaaacctgtcaccgacaagcttatgcattcgagagaccaaatcttcttcttcttgactcatgttcacaacttcccactcaagactactcacttctgttccttgtcatcaccaaaattcagatttctcattatatatagataagtataaaaaaacatggaaaaatgagaaaacgaaggtgtttaagttttcagcttaccttcagaag

SEQ ID NO: 170 - DNA, 471 bp, Arabidopsis thaliana
tttttttttttttttttttttttttataaattacatattcataaatcagacatttgacaatccgatagaaattgtctcataaagagaaaaagaacacagacaataggaaatgaaatgagcagagataattcataagaatgttttagaaaagaaattaagcttcggtgaagcttgggggcttgtaggcaatgaaactgatgcattggacttgacgggtgttgtcgaatccgatgatcctaatgaaggcgcccgggtactccttcttgcattcttcaacttccttcaacacttgagcggagtcggtgcatccgaacaatggaagcttccacattgtccagtaccgtccatcgtagtatccgggagtgtttccgtgctcacggtacacaaatccgtgctctaactcgaattcaacacaaggaatccacttgttgcggagaaggtagtcaacttccttagccaattcgacgtcac

SEQ ID NO: 171 - DNA, 471 bp, Arabidopsis thaliana
gtgaaatcgactagtaaggatgctcaggatctcttccattctcttcactctgcttataccgctacaccaacgaatctcaagatcatcgacctttatgtttgtttcgcggtcttcacagctttgattcaggttgcttacatggctcttgttggatcgtttcctttcaactcatttctctctggagttctctcgtgtatcgggacagcggttcttgctgtctgcctccggattcaagtgaacaaagaaaacaaggaatttaaggatttagcaccggagcgagcttttgctgattttgtcctctgcaacttagtcctccacctagtgatcataaacttcttgggataaactaaacacctctcaagccggacataaatctcatgagatttttgagaacaatcactgcacttgctttccatacatcataaactttatttctgatatttgagattttatcatcttagtagcccttat

SEQ ID NO: 172 - DNA, 471 bp, Arabidopsis thaliana
  misc_feature (1)...(471): n = A,T,C or G
aagcttgatatcgaattcgcggccgcttttaactttaaatacacgtaagatcaataggtttagattctttcttatcctttactaaaaagatattaaaacaaggtaacaacaacaacaacaacaaagaagaagaagcgannnnnntacacttttgagtttaaagactttttaatcagcacttgtatttttgttcctttgcatcaatcatatcgctcaaacttggctgctcatgttccaaattcctgtttgaagaatcatctcatcaccacccttagttggagaagagagagtgaggaagaactttgtaagggttgagaattccctttgggtccagcaactttttaatggaagccattaatgcaacagtttcgggtgatttgctgtagaagatttcattagctttcattacacctaatccatgttccgcactgatgcttccacggtgctttgatgtccactcatagacataag

SEQ ID NO: 173 - DNA, 471 bp, Arabidopsis thaliana
  misc_feature (1)...(471): n = A,T,C or G
ttttttttttttttttttttttcattcaaagacgttaattagatcactaacatatcgaaaaacataacacgacttattcttaatcaccccttaatacaataataatgcaaaaacacacagtttctttagttaatcacatgacaactcttcctgatctcaccattaaaaccngtaagaggctgaatgtttcccatgttaaccatcgactttgcgaattgttggaagaaaagtctctcgtcttcggcataagctttcactaatgcaccagtcttgcctacattgccagtgagaagcacttcatctgatgtcaataagcctttgccccatagaaggagcttgaagtatgtgttgtcgaatcttgcaggagaggctaagtctagaggtgaaatattgttgtcaccgcctgttggtggacaaattgacctgagaccatagtagtaagacctctctagcgtctcgtctggttggtta

SEQ ID NO: 174 - DNA, 471 bp, Arabidopsis thaliana
tggcattattgctggagttgttgctggagttacagttgttctctttggaatcttgttgtttctgttctgcaaggataggcataaaggatatagacgtgatgtgtttgtggatgttgcaggtgaagtggacaggagaattgcatttggacagttgaaaaggtttgcatggagagagctccagttagcgacagataacttcagcgaaaagaatgtacttggtcaaggaggctttgggaaagtttacaaaggagtgcttccggataacaccaaagttgctgtgaagagattgacggatttcgaaagtcctggtggagatgctgctttccaaagggaagtagagatgataagtgtagctgttcataggaatctactccgtcttatcgggttctgcaccacacaaacagaacgccttttggtttatcccttcatgcagaatctaagtcttgcacatcgtctgagagagatcaaagc

SEQ ID NO: 175 - DNA, 471 bp, Arabidopsis thaliana
aaactttctgcaaaaaaagagagattcttaaactttttatctcaagatcctttcaaaaaatctgaaaagagaagatttttaataaaaaagaatggttgaaactggtcaccatcatcaacatccaccggcaccggctgcagccggtcatccgccggttccatccatggcgatggcgcgtaacatgggaaccacttggcctccggcggagcaacttcatcatcttcaatattgcatccactctaacccttcttggcatgagacggttgtactggctttccagcattacatcgttatgctcgggactactgttttgattgccaacacactagtgtcaccaatgggtggagatcctggtgataaagcgcgggttatccagactatattgtttatgtcgggcataaacacgttgctacaaacgcttatcgggacaaggcttcccacggttatgggagtatcgttcgcgtatgttct

SEQ ID NO: 176 - DNA, 471 bp, Arabidopsis thaliana
gactttaacagcttcggatgtagatggtgctctcaacttaaggaacgttgagccgatatatggatttgcctcaggagggccatttcgttttagaaaagctattggacatcgcgatttgttctacactgatgacagagaagtggatttcaaagatgtgatcgaagccccgctgccaaaagctccccttgatactgaaattgtttgtcactggctggctattgaaggagtgcaaccagctataccagaaaatgctcctttagaagtcattagagcacctgcagaaaccaaaatccatgaacaaaaagacggacctcttattgacgttaggctaccagtgaagcatgtactatctagggaacttcagttatacttccaaaagattgctgaacttgcaatgagcaagtcaaatcctcctctgtataaagaagcattagtgagcttggcctcagactcaggacttcatcctctagt

SEQ ID NO: 177 - DNA, 471 bp, Arabidopsis thaliana
ggcttctgctctggattgttgttgtttgaactggactgtgagtgtaatcttcaggtctgattgttgttgttgcagaagccgaagaacttcagttttaacgatacgttcacctcaagtcctctctctttgaacaacagggcggtgtggctttggagcgttgggattgccttgctcatagaaacatttgaaaagagagacagcttcttctgccattattcctcctctgcacttgtatccttttcctctttgagcttcctcactacctaagtgaagcgacaaaatggaaccacatcccccaaatttatcatttggacatccataatacacttccttgataccgagaaacgataaggccgatgcacacattatgcaaggttcacatgttacataaagaacacatttcgagaatttctcagcgacttgtgaaggtgagagtccatctttctgccactgtccgacaagctgatcaat

SEQ ID NO: 178 - DNA, 471 bp, Arabidopsis thaliana
ccatctgtttctttccttcgaaccctttcttctccttccgcatctgcttctctccgctccggatttgctcgacgctcttccctcagctccacttctcgtcggagctttgctgtcaaagcccaggccgatgatcttccactggttggaaacaaggcgcctgattttgaggcagaggctgtgtttgatcaagagttcatcaaggttaagctctctgattacattggaaagaagtatgtgattctctttttctacccattggactttactttcgtctgcccaacagagattactgccttcagtgaccggcattcagaatttgagaagttgaacaccgaagtattaggtgtttctgtcgatagtgtgttctctcaccttgcatgggtccaaacagacaggaaatctggagggcttggtgatctgaactatccccttatttcagatgtcactaaatcaatctcaaagtcgttcgga

SEQ ID NO: 179 - DNA, 471 bp, Arabidopsis thaliana
aggtgacaaagcagttaatcagcttgacaaatctgttaatataaagcttgaagcaaccgtagctaggcaaattcaagcccaatttcagacctctggcaagcaagccctccaggaaggtcttaggtcaagtgtggagtcctcagtcataccttcctttgagaaggcatgcaaggccatgtttgaccaaatagactcagccttccagaaaggtattgctgagcatacaaatgcagcccagcaacggtttgactctggacactcccagcttgctcatactctaaaggaatcaattacttctgcgtcgtcagttgctcaagccttaagtcgtgagttagccgagacccaaaggaatctcttagctctcgcagctgctggagcaaattctggtgggtctaattccttggttactcaactaagtggcggacctttgggtgctcttcttgaaaaggttgaagcacctatggacccaac

SEQ ID NO: 180 - DNA, 471 bp, Arabidopsis thaliana
cacagagtacgcaccaccagccaaattataagtgagagagaagataacgacgacaagaagaagaaggagaagctccaaaattgttcatttgcatttctccaacttgtaaaatcgagcacctgcatttgggggctttcctcttatctggaaacaaagagagccgccactgatggaatgagtttccgtgaatcatccacccaggtgaaaggaatcataatttggttggtcaactaataataaaaatgggtgaggcaagtgattcagattcgtctgatgagtctttgaaacacaatagcaccccaccactctttagcatctctggcttcttttgtgttgccaaaggaggagactctgatcccggtaggagccctacttctccccttgattttggagtctttggtggcctctttagccccaggtcttcttcttcttcacccctccaccgaaacaaatggctttctcacaaagtcg

SEQ ID NO: 181 - DNA, 471 bp, Arabidopsis thaliana
catggttcgtagcgattcgtccgatccgttacatgctcagagaacagagactcgtcttcgtcctcgtcggcattgtcatcgccacattaggattcacaatcttctccaaatcatccaaccaccaaccaattccttacgacgtggatccgctttccggatacggaatgcgatcggagtcatcgtatctgccagcgacgattcataagaagccaagcatcgagtacatgagccggatcggatcggcaggcggcaaaatccctctaagcttgaaacggaaagtgctaagggttgttgtgacaggtggagcagggttcgtcgggtcacacctggtggaccggttgatggctcgaggagacaacgtgatcgtggtcgacaatttcttcacgggaaggaaagagaacgtgatgcaccatttcaataaccctaatttcgagatgatccgtcacgatgtagtggagccgatccttctag

SEQ ID NO: 182 - DNA, 470 bp, Arabidopsis thaliana
gtgtgatcgatcgtgtcaaatatcacatgagttaatatatatagcattactcctttcacatacattaccaaaccatctctttctctttctctctctcgtgagtttttgctctatataagtatctccctgttagagttccgacgaagcaaacgaatttcacatggagaggcaaattataaacaagagaaagcgagtcttttctctccaaccaaacaagaacccgtgaaacatgaagtagacatggctttcgcattgtctgctcaagaattcgcgtggagccgtttcttgcaacagaagctattatcttccccttatgatgatccaattagcactagtagttctccttccgagattctagaaagatcgagcaagagacaaggtggagaaaaacaccaagacagcgacgaagaagaagaaggaggagagatcaagaagagattgaaggaattgcagaagcttttgccaggtgg

SEQ ID NO: 183 - DNA, 470 bp, Arabidopsis thaliana
cgagcggccgcccgggcaggtcaaactcaatcccagcctcctcctcctccgtcttctcccttattcccttttcgtttaatcccccaattttttcaattaatccctccttttctcctcttaatctgaatccgaagcaacgcataatccataacaaagtctggaaaatttcttccgggataataaagagatccattaggagtaaattatctgacaagagaatacaaagggcaatttcattttagttgaattagggatttgggctcgtcatggctcctggaggcagtgctttgaaagaagtcatggaatctaattcaacgggaatggattacgaggttaaaacggcaaaagtggaagttaataataacaaacctacaaagccagggagtgcagggattggaaaatatgggatccattcgaacaatggtgtttacgagcttcttgaatgtcccgtctgtacctcggccgcgacc

SEQ ID NO: 184 - DNA, 470 bp, Arabidopsis thaliana
ttccataaccaaacttcaaatactcaaaatcaaaacataagttctcatgtctagcaccataaagatccactgacaacattccaaaatatccaaaacttgaaaattaaaaagcgattgaagataactctaaaagataaaacctttcaagaagatttcttcttccttcttacttaatcaacgttctgcataacatcctcagacgtaaacttagtacccttctccttatcagcagcagcacgtcccttagccttcctctccaaaagcgatttcctatctttatcaagacgaagcttcgttatcacaactttcgacggctgaatcccaacgttcacggttgttccattcaccttctccctcgtgattctctcgatgtgaatcacccatttgcgacggtaaacctgaacaactttgccttcacgtcccttgtaagtaccacgaacgatctgaacctcgtcgtctttacggatcgg

SEQ ID NO: 185 - DNA, 470 bp, Arabidopsis thaliana
  misc_feature (1)...(470): n = A,T,C or G
aaaacgatgcaatcaccatttcttcatctctgtaaaagcttcacttcttcttctccactttcatgtcacaaccacaatatatgctttggatttcataatgctctgttatctccttcaatctgcaatttccagcgacgaaacaatgtcaacgggagaaaaatcgttgcgcagggatcaagactaaacgacggaaatagccgtccggcgggaaacaaagggaaagtaagtctgaaaggtaacaaagagaatatatggagcgttgacaacgaaatggcggagaaggataagcgtaaggtgaagccaaaaggaagaaaaagcgggaagagattaggtggaggaagaaagggtaaattcggtagagttttggtttcagggacgatgttgatcgaatccgagnctgttcttcaaactcaggagcctgtgataaaaccagtttggagaacatttgcgagtagtgtaagtgggatttg

SEQ ID NO: 186 - DNA, 470 bp, Arabidopsis thaliana
acggcgacaatttctctctccggctaacttttttctagagaaagctatggcggacgaagaagatgagttactggagacagaactaagttacgaccagaaaaaggaaatcgccaagtggtttttcctcaacgctcccgctggagaaatcaattacgtcgctaaaggtacttagatgcatcgtacatacatatttccgacgattcctccgatgtgtccctcaatgagaagatttaaaggcggttttgagcgatgaggaagtgtacaatgaagcagccatggaagcatttccagtgtacaacaaaactcacatgatttgccttgaaatgcccagtggagctggtgatgtgattgtctcatcttacagtgaaattaatgaaaatgagtaccttgatccaagaactgcccaggttgccatagttgatcatgttaaacagatttgtacaaaggtacggcctgcaaatgatgaagaa

SEQ ID NO: 187 - DNA, 470 bp, Arabidopsis thaliana
  misc_feature (1)...(470): n = A,T,C or G
ccacgcgtccgaataaatggcgttacaaaggcaactcctgaagagagctacttccgatatctatcaccgccgtgcgatctctctcctccgtactgatttctctacttctccttcgattgctgatgctccaccgcacattccgccgttcgttcaccagccacggccgtataaaggtccttccgccgatgaggttttacagaaacggaagaagtttctcggaccttctcttttccactactaccagaagcctcttaacatcgttgaagggaagatgcagtacttgtatgatgagagtggtaggcgatatctggatgcctttgctggaatagtcactnngtcgtgcggtcactgccatccggatattcttaatgcgattacggaacagagcaagctacttcagcacgcgactactatttacctgcatcatgccattggtgattttgctgaagcattggctgccaagatgcccg

SEQ ID NO: 188 - DNA, 470 bp, Arabidopsis thaliana
cgttcaaccattctggggtaaaattgagacagagaagtatccacaagtggtaattgctgatctcgatgatgagctcatggggttaaagctattgcattatgatgctaagattctctgcattggtcagggatcggattctgctgtttcagggttcaaagagatgggtttctcagttgttcaaggggttcctaagcatccattgttttcctttttcagtaggaagcatgtcaacgagcttgagcttagtggtgacaagtcttttgatttcgtgctctgtggggatgttgatcatgttgcttcccctgctcttcttgtgcttgagatggagcgggttctgaagcctggtggaaccggagcagtccttgtgagtactaatgccaatcgtcttgtcaaatccgtgacttcggggcttaagcagtctgagatagtgcgtgtgaacaacttggataagttcaccgtcattgtattca

SEQ ID NO: 189 - DNA, 470 bp, Arabidopsis thaliana
  misc_feature (1)...(470): n = A,T,C or G
ccatgaattcttttgcaagaaatctcttcctgtttctttatcagattcccattatcttcataatgtggttggggacacagagatcagaaaaggagaaggaatgcaattagatcagcttattgagagcatatcacagagccgggagactaatattcgcatccagccttttgatatagatgagcttcaggagtctttccaactaaatgatatgactcctgttgaattacccccagcagagaagggagctcctacaattccgtctaagtcaaaaagtgagtcgaaagatagggacaggaaacataagaaacacaaggacagggataaagacaaagatagagagcataagaagcacaagcacaaacataaagatagaagcaaagataaagataaagacaaggaccgagacagaaagnnnnncaaaaatggccaccatgattcgggtgatcattctaagaaacatcatgataaga

SEQ ID NO: 190 - DNA, 470 bp, Arabidopsis thaliana
cttttcgaggctcttcaggaaggtctggaagaagagatggacagagatccacatgtatgtgttatgggtgaagatgttggccattacggaggttcctacaaggtaaccaaaggccttgctgataaatttggtgacctcagggttctcgacactcctatttgtgaaaatgcattcaccggtatgggcattggagctgccatgactggtctaagacccgttattgaaggtatgaacatgggtttcctcctcctcgccttcaaccaaatctccaacaactgtggaatgcttcactacacatccggtggtcagtttacgatcccggttgtcatccgtggacctggtggagtgggacgccagcttggtgctgagcattcacagaggttagaatcttactttcagtccatccctgggatccagatggttgcttgctcaactccttacaacgccaaagggttgatgaaagccgcaat

SEQ ID NO: 191 - DNA, 470 bp, Arabidopsis thaliana
  misc_feature (1)...(470): n = A,T,C or G
aggaatgcatgaggcatgctatggatttgagtggtctgctgctgctttattcttcattgggagatgcagatggaatgatgaagctggcagcacttgcaaaagagcaaggaaagaacaatgtcgcttttctttgcttgttcatgttgggtcaagtagaagactgcctgcatctgttggtggaaagtaatcgaatacctgaagccgctctgatggcgagatcgtaccttccaagcaaggtctccgaaatagtggcattgtggagaaacgatttgaccaagataagtccaaaggctgctgaatctctggctgatcccgaagagtatcccaatctctttgaggagtggcaagtcgccctgtcccttgaaaatagagctgcagagacgannggcgtccatcctcctgctggggattattgtagtcatgcagacagagatcatacaactttagtggatgcttttagaattatgcaa

SEQ ID NO: 192 - DNA, 470 bp, Arabidopsis thaliana
ccacgcgtccgaattccatcctaataattttcaaagctttaattctaagaaataatatctacaagaaaatattatctcatgtatggagactaccggagaagttgttaaaacaaccaccgggagcgacggaggcgttacggtggtgagatccaacgcgccgtcagacttccacatggctccgaggtcagaaacttcaaacacacctcccaactccgtcgctcctcctcctcctccaccgccgcaaaactcctttactccgtcggcggctatggatggtttctcaagcggaccgataaagaagagacgtgggcgccctaggaagtacggacacgacggagcagcggtgacgctatctccgaatccgatatcatcagccgcaccaacgacttctcacgtcatcgatttctcgacgacatcggagaaacgtggcaaaatgaaaccagcaactccaactccaagctcattcatca

SEQ ID NO: 193 - DNA, 470 bp, Arabidopsis thaliana
  misc_feature (1)...(470): n = A,T,C or G
gcccttttttttttttttttcttcgaataacgattaacgaaaaatgatatcacaaaatcgtcaaaccatgctacatagtaaaagggactgctctatagtgtcccgactccaaacaaaaaaaaaagtggataatgatattagtgagaagcggaagcaactttctcgcagttttctgattcagaatcatcttcagagaaacttggcggtttaggaatgaggcctaatgtcttgaacatgagctggtcagcgtcaaaatcattgtttggtgtggttaaangcttctctccggtgaagatagagtttgcaccagcaaggaaacagagagcttgttcggacattgagaaccggactctaccagcagacagtctcaccatcgcttttggcattacaatacgtgcggttccaatcatcctgatcatctcccatatctcaactggcttctggtcttcaagaggagtgcctttcactgc

SEQ ID NO: 194 - DNA, 470 bp, Arabidopsis thaliana
accaaagtgtttggcatggatccagtcaccagacaggttgtagtggttgatcctgaagcatacacttacgatgaagaagtgatcaagaaagctgaagcaatggggaaaccgggactcattgagatcagtccgaaagatgacagttttatattcactgttgagtccacaggtgcagtgaaggcttcccaactggtactaaatgccattgatcttctgaagcagaagcttgatgcagtccgtctctcagatgacaccgtagaagcggatgatcagtttggtgaactcggtgcccatatgcgtggaggatgaactcaagtgattaattcgagctctttgttatacctgtttgtttcaggttttgagtttcttctggagcagactgatattaaccgtagtggcactgtcttgtttgataacatgtgaagtggcagtcttctatttgttctggacctctgatccctctgttcctg

SEQ ID NO: 195 - DNA, 470 bp, Arabidopsis thaliana
gcggccgcctcaaatttatcggaatgcaagtggaggtgagcaagcacactgaaggggccaaagaaaaggctttgaggcccaatgggcttccggaatctctgattcgatacgatgcccgccaaaaagatatggcgacaaactcagtgacagagctagtagaggcggtgaagagacctcgggcactaagcgaatcgacgaatctccatcccttcatgacaaaatcggagagcgatgaacttccgaaaaaaccagctcggcgaatgtccgaaaatgttgttccgtcaggccgaagaaactctggcggcggaagaagaaactcgatgcagcgaatcaacgaaattcccgagaaaaaatctagaaaatcttccctttccttcatggggatcaagaagaagagcgaatctttggatgaatctatagacgatggatttatagagtatggagaagaagacgatgagattagtgatagg

SEQ ID NO: 196 - DNA, 470 bp, Arabidopsis thaliana
  misc_feature (1)...(470): n = A,T,C or G
gcggccgcaaataccaatggtcacttggagaggaacgtaagcgcaaagaggcatttaccaagctgcagattctaacgagagagctctcaagtgtgccacattctcaatctgacatactggctagcatggtatctagcaagggcgcaaatgttccacttcttgcacgtgtaaatctcaaactgggaacgtggcagtgggcactttcttccggtttgaatgatgggtctattcaagaaattcgtgatgcgtttgacaaatctacttgctatgctcctaaatgggctaaagcatggcacacatgggcattattcaatacagcagtgatgtcgcattacatttcaagaggtcaaattgcttcccagtacgttgtttctgcagtcactggatatttttattctatagcatgtgcagcaaatgnnaaaggagttgatgatagtttacaggacatactgcgtcttctgacattgtgg

SEQ ID NO: 197 - DNA, 470 bp, Arabidopsis thaliana
ccacgcgtccgctctataaacctcttttgctttctctcttcgtctctgaccactttggctccggcgttagttttttccctctctgctactgctgcggctccggctcctgctacggtatttgacaagtgtgttgacattctctcataacaattcaaatgggtgactcggaaaacgttcagcaaccttcaaaaaagagaggtgccttgaagcagctgtctcgtgataatccaggtcttgatgatgatgatgattcagctgaacttgagagtggaactttcaagaaggccagtgatgaggttttggctagtagaagaattgtcagagttaagcgcaaagagccatctgctgctccagttgcagcatccaatccatttgctggaattcagttggtccctacgactgcacctgcttcaacccctgtgggaacaaatgcacctctggctgagtcaaaattggctccagctgaagca

SEQ ID NO: 198 - DNA, 470 bp, Arabidopsis thaliana
acgcgtccgcgtcggaaatctctgatctctctcaggatcgcttgttcgctacgcagatctcacctgccatgactcgaggaagtcaaagagagcgtgaccgtgaaagggctctagctcgaaccggaggcaaaggaaagaacaaagatgatggattaaatcctgagcaacgtcgtgaaagagatgcaaaagcattgcaagagaagactgcaaagaaagctgctcaagccgctgctgcagctagttccggaggaggaggaggcaaaggaaacaataagtgagaaaaaatgatctatgcttcgatgtttgtaactgtgcttttgaatatgaaagtttggtgtttgtgttgagaatgttttggcttcgtttggtttgagtttgtatcaaaacttagacttggtgatgtactttgattaaaccaatgattactcttacaatatctatgattacaagtacatttgtccaaaaaaaaa

SEQ ID NO: 199 - DNA, 470 bp, Arabidopsis thaliana
aaaatctgttagccgaatcagatagagaaaagaagaaagaatggtgggaagtggagctccacagagaggaagtgcagctgcaactgcaagcatgcgtaggaggaagccgaccagcggtgctggtggaggaggtgcctctggtggtgcagccggatccatgcttcagttctacaccgatgacgcacctggtctcaagatctcccccaatgttgttcttatcatgagcatcggtttcattgctttcgtcgctgtgcttcatgttatgggcaagctctactttgtcaaatgatgacaaagataatagttgaagacaatgccaccctaagtgactgctagtgatccaaatattatacagtggtttcaagttaatgttttaattttgtggtttattaccagagtataaacgatctttcacaattccagtttctttacattcaaattttcaatattcttcacacaaaaaaaaaaaa

SEQ ID NO: 200 - DNA, 470 bp, Arabidopsis thaliana
  misc_feature (1)...(470): n = A,T,C or G
tttttttttacgttacaaagaaaaacatcatattagtttaattcttccactaaagcaaagactgcaatattttaaccttacgtacaatccaaacatcccatgggttttattgcattagataattttaactaatggactaatatttagatcctaaactttatgatatgatacgacgtggaatagattcaaactgtgaatgcacaaaaaagattacataannnnncaatcaatatcatcatgacagaagccaagcgaccaaagcgctttcgtcgtcatgatctaacggttctccaaagttctcacaattactattcccgatcgtggcctcatcatcaccgtctaaaagccacgagaccattgagtcgggattctctttctcatgccaaagattattatcactaccttcttgnnaaacacaatcccaatcgataaactcatccgtcgacgcatcgttaacttggtggtcgtag

SEQ ID NO: 201 - DNA, 470 bp, Arabidopsis thaliana
cttttttttttttttttttgtcaaataagattaagaaagagtagcttatatataagtgaaatccgaagaattatagagaatgaaaacagaggcatgaataatgcaaattactatacatttttttcttctatttcttgaagaggcttcctaagccaccaaatccaccctcgctcttcttcggcacaggcgtcggagctgagtttttaccaccgcgaacggttcctcggcctccggtggtggtgccttctttctcatccaccttctttagaagtggattagtctcatagaactgatcttgttttgtcataaacccaagaacaaagtcgatgggattcttctcctcctttgggccgcctgaacctccctttgtgcttgtggcgtaaaccctcacggtggccggagcaaatgacataagaagcgaagaaaccattgttgttatctctctctcttctctggtttcggacgcgtgg

SEQ ID NO: 202 - DNA, 470 bp, Arabidopsis thaliana
  misc_feature (1)...(470): n = A,T,C or G
aagcttgatatcgaattcgcggccgcatttatcaaatgtttgaattcttccatctctcataattcttaagtggtcgtggtgtgtactatctcctaagctctctgttttnnntttgtttgttcattggctatatttcaggtcttcttcttcttcttcaagaatgagctaatactcacagaagaagaagatttttctttggatttttcactactgaggcattgttgtgaaattggatggtagtagcattggaatggcagaacaaaagagtagtaacggaggaggaggaggaggagatgttgttatcaatgttccagttgaggaagcatcaaggcgttccaaggaaatggcttcaccagagtctgagaaaggagttccctttagtaaaagcccttctcctgaaatctctaagcttgttggtagtcctaacaagcctcctagagctccaaatcagaacaatgtgggtctaactc

SEQ ID NO: 203 - DNA, 470 bp, Arabidopsis thaliana
aaaatgtcaagatcgcatcatacataacaagcgtccaaggtttcaactatcttgcaaaaacacatggaactaattttttcttccttcaaaaataaaattaaaaactagggaacaaaaataaaacataaatgcacatattcgtcttgatcactactatatagttttacaacttttttttgacacctttctttaatggaaattctgattccttccttttttgataagaattttatgttgtaaaatagatctacacttcaagcttagtaacctgaggagttttttgtttttgttttattcttcttcactattagaagacgacggagaattgtttccatcgtcgccggctacccaatactgcttcgtggcgacaagaatcttctccggcacgagaggaccgtcttcatgatccattaacttagtatcccatctcattccatcaacgatcttcctcacatcattcaaaacatcaa

SEQ ID NO: 204 - DNA, 470 bp, Arabidopsis thaliana
gctttggggcacatctattgtccaaacagattttaactatgtgcatagcaaactacgaagcttcgggtagccaagttcagctaacactcgaaaggggtcttcctgcaatgattggctcttttatatcaaagcaattgccatatccttctctttcctttgatatgttgcattgcttaagatgtggcattgattgggaccagaaagatgggcttctccttgtagaaattgacagggttctcaagcccggtggttactttgtatggacatctccgctcacaaaccctcgtaacaaggatcatcttaaaagatggaactttgttcatgattttgctgaaagcatctgttggactcttttaaatcagcaagatgagacagttgtctggaaaaagactatcaacaccaaatgttatagttcccggaaacctggagtgggcccttctgtgtgtaccaaagggcacgatgttgagtct

SEQ ID NO: 205 - DNA, 470 bp, Arabidopsis thaliana
  misc_feature (1)...(470): n = A,T,C or G
tattactcaactctctgttgagaagtggttggagttaacacccagtaaaggtagtcaaacagatacgaaacccataagcctgcgagtcgctgtctcgtttactccaccagtacgcagtccatcagtcttacacatggttcaatcaagaccatcgtgcaaaggctcttgcttctttccaatcattggaaagtcccgtcttgctaaaagttcaacacacattgttgatgaaacccaaacagaggtgatcacacttcaaattaggaactccgctgatggaggaatacttaaagatgatcagagacaagttatgggtgtgacagactctggtgaaactcgcgtgcttgcggtttatactggtagtttctggtctttgctggactcgaaatggtcacttaagcaaataaacgcctccactgcngataatccgctctttgagattttgggccctcgagtggtgaaaattttctcgg

SEQ ID NO: 206 - DNA, 470 bp, Arabidopsis thaliana
  misc_feature (1)...(470): n = A,T,C or G
agtgcaataaacggtgttggtgatgtggtcttatgcacctttctaggatatggtatagcaggtgcagcttgggcaactatggtgtcacaagttgttgctgcttatatgatgatggacgcattgaacaagaaaggatacagcgcattctcattctgtgttccttctccaagtgaacttttgacgatttttggactcgctgcccctgtctttataactatgatgtcaaaggttttgttctatacgctccttgtgtactttgctacatcaatgggtacaaatatcatagctgctcatcaggttatgcttcagatatataccatgagtacggtttggggggagcctctctctcaaactgcacantcctttatgcctgagcttttattcggaatcaatcgtaatttgcctaaagctaggnngcttctgaagtcactagttatcatcggagctacgctaggaatagtagtcggaac

SEQ ID NO: 207 - DNA, 470 bp, Arabidopsis thaliana
  misc_feature (1)...(470): n = A,T,C or G
gtcggagatggaatcagatgagggatttgctcttagagaatggagaagacaaaatgcaattcaacttgaggagaaggagaagagagaaaaggaattgttgaagcaaattattgaggaagctgatcaatacaaagaagagtttcataagaagattgaagtaacttgtgaaaacaacaaagcagctaacagagagaaggaaaagctgtatctggagaaccaagagaagttctacgcggaatccagcaagaattactggaaggcaatagcagagctagttcctaaagaagttccaacaatagagaaaaggagaggaaaaaaagagcaacaagatcctaagaagccaacagtctctgtgattcaaggtccaaagcccggtaagccaaccgatctaacnngaatgagacaaatattggtgaagctcaaacacaacccaccttctcacctgaaactcacttctcaacctccatcgg

SEQ ID NO: 208 - DNA, 470 bp, Arabidopsis thaliana
caccaccaaacgaacccaccagcaagatcacattttttccagattcatgaaaaatatttaatgaacccaaactaggatgttggtgatgatgatgatgatgactcaaaccggtatggcatcaacattggatgagtcttcacatctcaatactattccttcaagacttgttgggaatgtgcatctcctccattgccaaccagctgctagtggctctgatgatggaactatcatcaacacattatcgtttctctgcaccactccaatcacactcactgtacttccttcttttatatacccttctttgagccgcattattcgatcatcgcttgttagattcttcttgcctaaccatcgtacaaaatcgggagacacttgctcgcttccttgcttgaagtcgatgacaacagaatcatctacaagaggtgttacctttgcaccgcttccggttttgactaaggctctgagcccag

SEQ ID NO: 209 - DNA, 470 bp, Arabidopsis thaliana
acgggtttgcgtgtctctaccaaaatttttgcagatacaacaactctaattttcttttcttcttcaatggttataacactatttgtcgttttagcatcagaaccaccacaacatcaacggagatccaacgaggccatagatgtttgaagaaagtcattttttgaacagttgtttcatgacatcgatccttttcggttcatcaggtcgtggtaataaagaagcacacacatcggttgtccgaaaatgcagaagatgaaccagaagatcatgttccccaccgttgagccaaacctttcctgtagatagtttgtgatgaagaccaaaggcacctgaaacataatcccaagaaaagcccatagcttgaagagacgacaaggaactgcgatgcatagctcatgaaagactgcagagactaggaaagcaatgataatggcgagtgtctttggtatcttgctgcgcaagcacgggaa

SEQ ID NO: 210 - DNA, 470 bp, Arabidopsis thaliana
ctatatgatcctataaaagaaatagattgtcaaattcctttagttatttacaaaagaatcaatcaacaaagaatatgaaagagacttcaaataaaaaatccaccacaaccgacatcttatatttggcaaatatgtaccatcctatgtgcctcctctaatcttaacttataattagctacctgctgaagagacgaaaaagctcctccttttgcttctagtcttcctttaattctatgcaataatagtctacaaaatagtctcttgtttttgttgagaatgcagctggcatgtaattgatcagatgagtcagccagtgcgggtggcttcagcggccctttcccgcatcatctccattacagcagctctacgccttttgtctgcctgctgctgcttccttctactaatcgctctcaaaccgctgcatttggggacagtgcacttggaatctctacagttgcgggcatggagtt

SEQ ID NO: 211 - DNA, 470 bp, Arabidopsis thaliana
agaatcatcaaagcccaaagaaacacaacagagaataaaaaaagaaatgacaaaagttcacccaaaattcccaagcacatgcgaagagagcttgtgtgatagcaaagcagcagttgttttaacggtgtggaagaagtcccttctcttcaactgcgacggattcacggtttacaacgccaatggagagcttgtctttagagttgacaactacatgaattgtcctagagacaacatcgtccttatggatgcttccggctttcccctcctctccattcgccgcaagaagttgagtcttggagattgctggatggtatacgatggagaaacagagagagatccaatattcacggcgagaaagaacgttagcataatatctaaccggaaaagcttggcgtgggttagcgcaaagaagacggtgttgtacgagatagaaggatcttacggtcaaagaagctgcaaaatattggatg

SEQ ID NO: 212 - DNA, 470 bp, Arabidopsis thaliana
atttgaatcttctcaaagctacacagatctctggaatcgaaaaagcttgagctgtgttaatggcggaggagaaatgggtggtgatggtgacggcgcagactccaacgaatatcgccgtgattaagtattggggaaagagagatgaggttcggattcttcccattaatgatagcattagcgtcacgcttgatcctgatcacctctgtactctcaccaccgtcgctgttagtccttcctttgatcgagatcgaatgtggctcaatggcaaggaaatctcgctttctggaagtaggtaccagaattgcttgagggaaattcgaagtcgtgctgatgatgtagaagataaagaaaagggtatcaagattgcgaagaaagattgggagaagctgcatctgcacattgcttctcataacaacttccctactgctgctggcttagcatcttctgctgctggttttgcttgcttagtt

SEQ ID NO: 213 - DNA, 470 bp, Arabidopsis thaliana
  misc_feature (1)...(470): n = A,T,C or G
agagaaactgaacggcatgttgctcaatgacaagcaagtgtatgtgggtcctttcctgaggagacaagaaagagactccactgctaacaaaacgaaattcaccaatgtgtatgtgaagaatctcgcggaaagtactaccgatgatgacttgaagaatgcttttggcgagtatggaaagataacaagtgctgtcgtgatgaaagatggagaagggaagtccaagggctttgggtttgtcaactttgaaaatgctgatgatgctgctatggctgtggagtctctcaatgggcacaaatttgatgataaggagtggtatgttggtagagcccagaagangtcagagagggaaacagaactaagggtccgttatgaacagaattngaaggaagctgcagacnagtttcaaagttcaaacttgtatgttaagaatttggatcctagcatttcagatgagaaacttaaagagatct

SEQ ID NO: 214 - DNA, 469 bp, Arabidopsis thaliana
cggccgcgcactaattaatcatgctacatacatagtcaaagttcgtagtaagtagacttagaaatagttaccgttagagttattacgattaggacaagcgttagcaaaatgtgaaggatcgccacatgagaagcaccttataccactcactggctctccagttgcagagacaaagcttgttccagagccgcgtcgtcctccactgctttggccgcctctacctccacggccacgaccacggctgccacgtctaccgctcccgccgctattagaccctgttgttgcattcccactactgttgtttatgctatcttcccatgcaaagaaactgcagccttgtgttggacatgagaagaattgtcttcccctgttagcttctgtgttggctgtacgaagaacacattgtgatccacaagtgttacatgatactgtactttcatcgtttctcggatttgttgcagtaggacga

SEQ ID NO: 215 - DNA, 469 bp, Arabidopsis thaliana
cattaacatggcaaactaaaatttcccaatcacatctgtatcaatgtgagaagatttacaactcttttcttttcttctcttctctactttataaaaaaccataaactatgaaaactgaaaaagattgttctaagattttgtcactacagagagtcaagagagacctatagttttgtagaacacctctgcttcaacttcttcagccaatagatatttaactattataagtctcagaaaccagaaaggtatatacaaaccacctttttgatctcttcaagttatagtcctattgtatcattggtgaggatgtcggcgtttggctctgcggtacccggtggttggttcttttttatggttgtgtctcttcttccccttaggattggagactgcagaaagcaatttgatgatgaatataagagggaatccaattaaagctgtggccccaacccaagctaagtccatggtagca

SEQ ID NO: 216 - DNA, 469 bp, Arabidopsis thaliana
ctttttttttttttttgatttgaattgtcagaaagaatccagagaaagctattaacgttcctgagattttggacaagtactacaccatctacagaccacaacaacgagcacacggaggtgatttaaggttagtctcttcattattcacaggcaattctggtttcaaaactgctcaggcagatagcaaacgcttgaaacgcagaaatcggatatccataatccatggtaaacatgtccttcccaactttcccaaactggagtatgatcctctcagatgtctgccctgcttcacagtcactaactgccacaagctgaaagttcttaaccgaagccactgtgactcgaccatggaaatttaagcaccagcaacgtaactgctcatgccaccgtggagctttgttgctcagcaccaatggtggatctcccaggttgttgcctgagtcgctacatgatgcactattactgcgca

SEQ ID NO: 217 - DNA, 469 bp, Arabidopsis thaliana
tttttttttttttttttttttttgatttttttttgaaattcttaattagttactttgtgtatcatacattgttgaaacacaccaatggatcctttaagattatttaaccggacaaccatcaacaattactcctctagcggttggacatttagctagatcacaatgttcacctcttgttccccaccagtccaaactcttttcctccatccccaccgagaagtacaacaaaaccgccatgaaagctacaccggcatccatagcggctgagagaacgtagttatacctctgccaccaacttttcctgtaccggaacacaaacaagttgaatatcgtccccaccaatatccacgagttgtagttcaccgcggtcgcaggtggcatcattgcggttgctcctagaagaacagggagatttacaagtggaatccaagaacgttttgggaacgctttgtgcaatgaccacactatg

SEQ ID NO: 218 - DNA, 469 bp, Arabidopsis thaliana
tcgagcggccgcccgggcaggtgtttcagtgagagggaggcggaggaacaagctgaacgtgaaaggctgaagaagcagtggcttcgtgaacaagagcagattaaaaacgagcctcttgagattacttacagttactgggatgggactggccatagacgagttattcaggtccgcaagggtgacccaattgggaattttctgcgggctgttcagcagcagcttgcccctgacttccgggagattcggacggcatcagtggagaatttactatatgtaaaggaagatcttattattccacatcaacacagtttctatgagctgatcattaacaaagcgagggggaagagtgggccgctgtttcactttgatgtgcatgaagacgtgagaacaatagcagatgcaacgatagagaaagacgagtcgcatgcgggtaaagttgtggagaggcattggtacctcggccgcgacc

SEQ ID NO: 219 - DNA, 469 bp, Arabidopsis thaliana
cgatctcgattataagatggcgaaggaaccagttcgtgttcttgttaccggagctgcaggacaaatcggatatgctcttgttcctatgattgcaagggggataatgcttggtgctgatcagcctgtgatcctccacatgcttgatatcccttttgcagcagaagctttgaacggtgtgaagatggaattggtcgatgctgctttccctcttctaaagggtgtggtggctacaactgatgccgttgaagcgtgtaccggtgttaatgttgctgtcatggttggtggtttcccgaggaaggaaggaatggagaggaaggatgttatgtccaagaacgtttccatttacaagtctcaagcttctgccttggagaagcatgctgcaccaaactgcaaggttctggttgttgcaaaccctgcaaacaccaatgcattgatcctgaaggaatttgcaccatcgatcccagagaag

SEQ ID NO: 220 - DNA, 469 bp, Arabidopsis thaliana
ccacgcgtccggagacctgttgtggatttgttctacagtccaatcactcctgatggtttcttcctcatcagcgcaagtaaagattctcaaccaatgttgagaaatggggaaactggagattggattggtacatttgaaggtcataaaggtgctgtgtggagttcttgtcttgataacaatgctttacgtgcagcttctgcatctgctgatttttcagcgaagctttgggatgctttgactggggatgtcttgcattcttttgagcacaagcatattgttcgagcatgcgccttctctcaggatacgaaatatctaatcacaggaggatttgagaaaattcttcgtgttttcgacttgaatcgcttggatgcacctcctacagaaattgataaatctcctggttctatcagaacactaacatggcttcacggtgatcaaacaatattaagttcttgcactgatattggtg

SEQ ID NO: 221 - DNA, 469 bp, Arabidopsis thaliana
tttcgatattaaaactttatggttctctttatttggtgggtcttgtctaaaagatctcctacaggctacaatatgaggtgtaaaaacaggaaaataaaatatgaagaagaagaaggatgtgggtggggaaagaataaagggtatattcagagattagattagaatagtggggtcaatgtggaggaaagaaaagtggagtggaatctctttgaagcacctttccaccttgaataattttaactttgctcatcttctcttcacaccaatgcaaattctcttcgttcatttcattcatccttaacactcttgaaaccactttcaaatctattaatcccatcaatatctccatttcctcctctatactcatcttcttcttcctcatgtatttccctcctcgacgcatctctttcagcttcgtctttttctttgtgttgacttcttcatgagatgtacaagggttggatcaacg

SEQ ID NO: 222 - DNA, 469 bp, Arabidopsis thaliana
ttttttttttttttttttttttttttttttttttttgttaaactaactcaattcatattctgaaaaataattagacgtatcttacttatacatcaatttatcgatactagctataatcatattaattcgtttttcgtcattttatatatcgatcagcaatcaacgacgcagcctcgttgtcgtggcaaatggcgattgtttgcacccgaacctggatagtcgtttaactccatcaccatcctttcttcgacctccttcttcacatccattagtgtatcttgttgaggtcgaacaatttttggcttctccatcaaactcccaagtctcgaagcatgggaagggaagaagaagatgtgtgatagagccaagaagaagatgacgaggagatgaatgagagctttgttagccatttgactatatatgaatagttatgacaaaattaaatttagttaaaaccttgatgttgttg

SEQ ID NO: 223 - DNA, 469 bp, Arabidopsis thaliana
ttttttttttaaaacccaaacgaaataaatctttatttctattttttgcctgcttttttcctttttttctcttttttttttgatgaatgaatagagagagttacacgaaaaaaaaagattacaaagaaacagtccatggaaatcgagagactgttgataatgaacattacatttacaagcatttacagaaacagatgataaaagaaattgattttaaatgttattttttcagggtattaaagatcatcagtgagtaaaagttgcagcaaacgggattagtatgtgaccccttctccattagagctttctttggccatagtttaactaaactcaaccttcttcggagaaagcgaaaacaccaccaagcatgtcatcgtcctcatcatcatcgagttttccatcagatggagcatccttatgctcagtttctgtaacagtttcattggagaccacctcctcgaaaaactgc

SEQ ID NO: 224 - DNA, 469 bp, Arabidopsis thaliana
gtctaccaccggacagattattcgatgcaaagctgctgtggcatgggaagccggaaagccactggtgatcgaggaagtggaggttgctccaccgcagaaacacgaagttcgtatcaagattctcttcacttctctctgtcacaccgatgtttacttctgggaagctaagggacaaacaccgttgtttccacgtatcttcggccatgaagctggagggattgttgagagtgttggagaaggagtgactgatcttcagccaggagatcatgtgttgccgatctttaccggagaatgtggggagtgtcgtcattgccactcggaggaatcaaacatgtgtgatcttctcaggatcaacaccgagcgaggagggatgattcacgatggtgaatcaagattctccattaatggcaaaccaatttaccatttccttgggacttccacgttcagtgagtacacagtggttcactct

SEQ ID NO: 225 - DNA, 469 bp, Arabidopsis thaliana
ctcttagaggaagactcttcatcagcagagaaccaacttggtaatccgaacagtactcttccacatgtttctgaagccgaagaaggcaatatggggtattatacacctgttcaaggacttgttaatgagattgaacacaatggagagtctggagataacaatgtagagactgagagaagcacgaagcatgcggctcaacggaactactacgatcatgtggatatagatattgagcaaatggatagtgatgatgatattgaagaatggggtagacacttagaggactgtcatcagcgaagaatcgacatggtaatccaaacactatgcagtatgtttgtgaagccgatgaagacaatgatggatgccattagactgatcacaacgaagagcgaggagacagtgatgaatagtgatataggcagggagactgatcactttgaagagtgcgaagatagtgatataagcaatg

SEQ ID NO: 226 - DNA, 469 bp, Arabidopsis thaliana
  misc_feature (1)...(469): n = A,T,C or G
tgggatatgtgaagtcaggtcagcacaagactgggactaaagtcaagatcttggtccgtgggaaaccatatgaaggcagcatcacgaagatgccattcgtggccaccaaatactacaaaccaacatgaaatgtgtgtctccttcgtccatgactttgtctcttgcttctgttaaatgacttgtgtttttcttctgttctgttttggcctgaaaaatgtacnnnnnccgcgnccggcgcgagcggccgcccgggcaggtacgaaagagtgagacgagttctggagatgaagaagggaatggtgaacgttgggttgaagttatttcttgggagcctcgtgctgttgtttatcacaatttcttgactaatgaagaatgtgagcacttgatcagccttgctaaaccgagtatggttaagtcaaccgtggtagatgagaaaaccggtgggagcaaagatagcagagtgagaact

SEQ ID NO: 227 - DNA, 469 bp, Arabidopsis thaliana
acttgttcactaagaaaaaatcaaaatcaaaatcagagcaccaaaaccgactcagatctagatcggatttctccaatggctctcgaatgggttgtgttaggttacgcagcagcagctgaagcgatcatggtgattctcttgacgatgcctggacttgacgctctccgcaaaggattagtcgctgtaactcgtaatctcttgaaaccgtttctctcgataatcccgttttgtctcttccttcttatggatatttactggaagtatgagactcgaccttcttgcgatggtgattcgtgtactccttctgagcatcttcgtcaccagaaatcgatcatgaagtctcagcgtaacgcgcttctgattgcgtcggctcttgttttctactggattttgtactctgtcacgaatttggttgtgaggattgagcagcttaatcagagggttgagaggctcaagaacaaggattaag

SEQ ID NO: 228 - DNA, 469 bp, Arabidopsis thaliana
ccgccaaaatcattacactcgcaagctaaagtaatccgtttcaatattagcctatctcctcttagtatccatatcctgagttgtccattgggttgccgacgggaactggttcaggttccttgatctcaacaacaacgcagtccgacatcaagaaagtctttgcaaccgaagctgcgtgttccaagcaacatctcacaacctttgttggatcgatgattcctgcagccatcaaatcctcgtacttgccggttgcagcattgtaaccgaatttcacgttatcgttggaaagcaccttctcgctaactacacttccattaacaccagcattcttggcgattagttttagggggtaacttagtgctcttttaactatatccgctccaaccttttcttcatcattatcaagcgtggctttaatggcatcaaccttggaagcaagacgaagcagagtgcaaccaccaccaacaac

SEQ ID NO: 229 - DNA, 469 bp, Arabidopsis thaliana
cctctagagcggccgcccttttttttttttttttttttttttttttttttttttttttcccacaagctccatcatcgattggtgtataagcatagcatccacactagtaaagaaatcaacattgtcaataagcgtgattacaatgacattctaatatttataggaatttcaaacaacaatctgttgttgtcgaaagttccgcagcatcatctacgcttaagtttattccttgatgcttgtgaaaaggaaaacagagctccaccttcatttcttacccttaaagcgagaagaacggcgagtggcagatgtggatacaggagctaggagtggtgattcgctacctcttttttgtcgccgattcacttgaaccttagatcttttgttttctggagttgacatgtttgtatcagtggaaaatgatatagctggagctgaagcagatatggcagacgtttcctgttgcagttgt

SEQ ID NO: 230 - DNA, 469 bp, Arabidopsis thaliana
aaacaattatgaatctatgaaaaatgcgtatgtcgagtctttctaatacaaaacttcatacaaataatgaccaaagagaatataaaatagtcaattatgaaaatattcaaatgataagcagacaagtaggtgactcagcgcattaagcaacccaaggacaaaatgggaactatatattatttcccttttcttcaccactctccttccgatacccaaaaccggaaccaatgacaacgcataccaatggcgcattctcatacttttccgattttaccctttagttttcccacaattctcgattagaccatttctctccgccgccgaaacctacggagaaggaagagaaaaaccatggaatcgtctccggtaaactgtcttccacctgattctctccaccagatcttctcatctcttcctattcgtgatatcatgatctgcagatccgtctgcaagttcttcaaccagcttt

SEQ ID NO: 231 - DNA, 469 bp, Arabidopsis thaliana
acttggactaacagaaactcaccaaacacttatcgcaaatggactaagagaaagagtcattttaagagtcgatggaggcttaaagagtggtgttgatgttctaatggctgcagctatgggtgctgatgaatacggattcggttccttggcaatgattgctactggttgtgttatggctcgtatttgccacactaataattgcccagtgggtgtagcaagtcagagagaagaattacgtgcaagattccctggtgtacctggtgatcttgtcaactacttcttatacgtagcagaagaggtgagaggtatcttagcacagttgggatacaacagtttagatgacatcattggacgaacagagttactgagaccacgagacatttcgctagttaaaactcaacatctcgatctgagttatcttctttcgtctgttggaacaccttcattgagcagtactgaaatcagaaag

SEQ ID NO: 232 - DNA, 469 bp, Arabidopsis thaliana
tcttttttttcttactttcttggtttgtcaaatatggtcagccatccaatggagaaagctgcaaatggtgcgtctgcgttggaaacgcagacgggtgagttagatcagccggaacggcttcgtaagatcatatcggtgtcttccattgccgccggtgtacagttcggttgggctttacagttatctctgttgactccttacgtgcagctactcggaatcccacataaatgggcttctctgatttggctctgtggtccaatctccggtatgcttgttcagcctatcgtcggttaccacagtgaccgttgcacctcaagattcggccgtcgtcgtcccttcatcgtcgctggagctggtttagtcaccgttgctgttttccttatcggttacgctgccgatataggtcacagcatgggcgatcagcttgacaaaccgccgaaaacgcgagccatagcgatattcgctctcg

SEQ ID NO: 233 - DNA, 469 bp, Arabidopsis thaliana
catttaataaacgcgtctcaagtccgacattgcgtcggtgttgtcaccataatcttcttcttgactctatatcgaaaaaagcttccaactttatctcgttaaccgaaactccggcgacaaagcttctacctttatgttctaaaatcgaaactccggcgataaagcttctattttaatttgtaaattgaacttccggctgaattttaaccggagtatgtagattccggcacacaggctttgaagaaatgaataagcaacgaagaagaaacgttcaggctcatggatgtttggctcggatggtgaatctgtttgattttggaactgttggtaatggaaagaaactgctcactgagaaaccccattttgatcatgggtctatcaaggggaatcaatttgatcagatagaagataaagttgatgtgaggaatggtggagtcaatggaacaccaatgaagatgcttttagaaca

SEQ ID NO: 234 - DNA, 469 bp, Arabidopsis thaliana
  misc_feature (1)...(469): n = A,T,C or G
aattacaagaagaaaagaaaacaagagataatattcttgtttctctggatagaagacagggacagacgaagaacaatctgagttgatcagatagaaccaaacaaccaacaacacttcggggatttctcttttttcatgaaaggttggttcttttcccttttcttgtgttaacttgcggttgaagcaagcaaacccgaggttgagaaaaatcgacacaaacacacacaccgaaaagacaaaaaaaaaagataattggctttttaaatgacaaatgtgtgtaaatttacacttttgtctgaatataatggaagatggttttgaattttggtggnnnnnnagtaactatgaggaacattgacgtcctctgcgacaaggtagagctccagcgtcggaagtaatgtgtccgaccaatgacgaagatttcgcggaaaggctggaggcacgtgcgtagctgccagacgcggcggct

SEQ ID NO: 235 - DNA, 469 bp, Arabidopsis thaliana
cagcctctatcggattctggcgaggggatgttaagatattgatagaagacattgctgcattgaaacctactgttttctgcgctgttcctcgcgtgctagagagaatatacaccggtcttcagcagaaactttctgatggtggttttgtaaagaagaaattattcaactttgcattcaaatacaaacataaaaacatggagaaagggcagcctcatgaacaagcatctccaatagctgacaaaattgtatttaaaaaggtaaaagaagggttgggaggaaacgtgcgtcttatcctctcaggagcagctcctcttgcagctcacatcgaatctttccttcgagttgtcgcgtgtgctcatgttttgcaaggatacggtctaacagagagttgtggtgggacttttgtgtccattccaaacgagctttcaatgcttggaacggttggtccaccggttccaaacgttgacat

SEQ ID NO: 236 - DNA, 469 bp, Arabidopsis thaliana
tcagaatttcagagatgctcccaaatgcatggttccacaagctcaaagacgtgactaaacactctaaacccaaaaacaaagcttcttcttcttcctcaaacacttgtagcaagaagaaaccttcctcagattctcttcctcaacactcttatttctccaacagcttagtagctaacaatcctcctcaccataactcaccaagaaactctcttcacacaaaaaagatgagtaaaagaaagacactttacaagccatcccttaaacctttgactcctcctcctcttcttgtatctgcaagtttcaacaagagcaagatcaacgatcaagattcgtcttacagcttgttcccggctattgaaacctcccctgagtcttttgtgtatagtttctacgaagaggatgatgatgatgagttcgttgaattttccaacttcaagatcaacacaaagaacaaagctttcaccaagca

SEQ ID NO: 237 - DNA, 469 bp, Arabidopsis thaliana
cacttcttaagcttcaacaagaaagaaatagtattcgcatagtatcagaagatggattttttcaatcaagctaaagccgtaaggatgcgtaacgtccatgataagtatctaacagcggatgaggacgaggaaacggtgactcaagacaggaatggttccgacaagagagctagatggattgtcgagccggttcgtggttcctttgaagtgatccgtttaaggagctgctacggtaactatctcaccgcttcgaatgagcggttcttgctcggagccactggacgtaaagtggtcttgtctaaaccggctcgactcgactcctccgtagagtgggaaccggtgagagaaggttccaaaatgaagctcaagactagatacggaaacttgcttcgagccaacggtggacttcctccatggcgtaactctgtcacgcatgacacttctcatgtattggattctttcttgtggg

SEQ ID NO: 238 - DNA, 468 bp, Arabidopsis thaliana
gcggccgccgcaattctcaccgtccacttcttattcgccgccgtaacctcccaatcctccggcgatttcgtaccgatcgagtcgaaatgcaacggtaccatcgccgagtgctccttatccacggcggaggaagagttcgagatggactctgagatcaacaggcgtattttagcaacaacgaagtatataagctacggtgcgctgaggagaaacacagttccttgctcacgacgcggcgcatcttactacaattgccgacgtggagctcaggctaatccttactctcgtggctgtagcgctattactcgttgcaggcgataatctctttctctatgtactttaaaatttttactctcaaattcttttgttttgatttttatacaatttttcagattattatttgttttgattggtgtttactatgtttatactttgcattgcaatatagtttcatacagtctcaatata

SEQ ID NO: 239 - DNA, 468 bp, Arabidopsis thaliana
tcgagcggccgcccgggcaggtcaagcctaaaatgtaaaccatccagtccaggcttcggtccacattttaggcttgtaagccttgtttggggagaagtaatcacagtagaagccattgcaagcattgataatggggtcaggagcatcgtcttgtttgcacatgacccaagggacaccagtgcctagccccaccgccatcttagctgcccagtttgtgtaagaccgtcccggtgcaccaagctcatactccattggtccatattcattttcaatctgagagagaattataggaccgccttgagattcaaaaagcctctcagctttcatcatgttaacaattcttgtggtgaatctttgcatttgagccttaaaaggaccgttatctgttctgaagctaatccctggaatgtacttaagccacacaggaaatcctccgaagttccattcagcacagacataaggaccaat

SEQ ID NO: 240 - DNA, 468 bp, Arabidopsis thaliana
agcggccgcccgggcaggtctctccttcaacaaaattttctacctttgtttcttctctcagatttcataaagaaaagatttaatctttcattggaatctgtgagtaacagaggataagcgaatatgggttcaatctctttatccaattctatgcccataactcgacttccactacttacatcactctatcatcaaagcttccttccgatttcttcttcatctttctctcttcttcctctctctaatcgtcgtcgctcctccactttttcaccgtcaatcaccgtctctgccttcttcgctgctcctgccagcgttaataataataactctgttccggcaaaaaatggaggttacacagttggggatttcatgactccgagacagaatttgcacgttgttaagccctctacgtcggtcgatgatgcgttggaacttctggttgagaagaaagtcacgggattgcctgta

SEQ ID NO: 241 - DNA, 468 bp, Arabidopsis thaliana
agatcaagttagacaactggagaagtgcttcactatgaacaagaagcttgagccagatctgaaacttcaactgtcgaaccagcttggtctacctcaaagacaagtcgctgtctggttccaaaacaagcgagccaggttcaagactcagtctcttgaggtccaacactgcactcttcagtccaagcacgaagcagctctctccgacaaggcaaagttagagcatcaagtgcagtttctccaagatgagctgaagagagcaaggaatcagcttgctctgttcacaaatcaagattctcctgttgataattctaatcttggttcttgtgatgaagatcatgatgatcaagtggtggtattcgacgagctttacgcttgctttgttagcaatggacatggatcttcatcaacctcatgggtctgattctgtttcgacgcagacaagattccaatatatatagtcttgtctct

SEQ ID NO: 242 - DNA, 468 bp, Arabidopsis thaliana
  misc_feature (1)...(468): n = A,T,C or G
agaagaataacagataaaactctctgtgtgagtgagtgagactcaaccatggcgtctttggctcagcaattctcgggattgagatgttccccactctcttcttcttctaggctatcgaggagagcttcgaagaactttccccagaacaaatctgcctctgtttctccgactattgtcgccgcggttgcaatgtctagcggtcaaacaaaggagcgtcttgagctgaagaagatgttcgaagatgcttatgaacgatgtagaacttctcctatggaaggtgttgctttcaccgtcgacgatttcgctgctgctattgaacaatacgacttcaattccgaaatcggcactagggtaaaaggaacagtgttcaagactgatgcaaatgnnncattagttgacatttctgcaaagtcatcggcttacttgtcggtagaacaagcgtgtattcatagaattaagcatgtggaa

SEQ ID NO: 243 - DNA, 468 bp, Arabidopsis thaliana
ttcctccactctataattacagtttaggttttgcaaactgaaacccaagacagagatttattacaattttcaatttagctgaaccagctttatgagacccatgacccatcctatacccaaatacaataaacaaaatctaatacagatatatttaaatcaattaaaagctccacaatcacgacggatattaccattactaccagttttaacaccaacacgaccaagcttgatcatcgagttaataaaagcttgattaaacaactgtccattattagcccataagtcaacggttggctttgaccgacgatccgtgaataagacttgatccgacgtgaacaatcctttcccttgttgcaagtttttgtagtaaacgttgtcgaattgtcttggtgttgttgggtccatgttaatagccactcttggatctatgtttcgaggacacgacgcttttagctctgtcacgtaatc

SEQ ID NO: 244 - DNA, 468 bp, Arabidopsis thaliana
tatttaagtttagcaaaaaaatcctaagcttctacaatggcgaatcttcccaccgttctcgtcaccggcgctagtggcagaacaggccagattgtgtataagaagctgaaggaggggtcagacaagtttgtagcaaagggtttagttagaagtgctcaaggaaaagagaaaattggaggagaagctgatgttttcattggggatataacagatgctgatagcattaaccctgcgtttcaaggaatcgattcgcttgtgattctcactagtgctgtgcctaaaatgaaacctggttttgatcccactaaaggtggaagacctgagttcattttcgaagatggacagtatcctgaacaagttgattggattggacagaagaatcaaattgatgcagccaaggttgctggtgttaagcatattgtcgtggtcgggtcaatgggtggtaccaatccggatcatcctttgaac

SEQ ID NO: 245 - DNA, 468 bp, Arabidopsis thaliana
tatatttttaaatttgcatatatagcagaacatgaatgaatataaaacatcaaacttttgatatgtgtatttagtatagataagacttggtcaaatcagaggaacattcttaagtaatcatccatgcgtttgtacttgacgtcaggataaagactagaagcttcttcgtcttctccgacttcgtgatcagtgagacatccttcatagaaaatgtgatagaaatgtcctatccctgcttggtgtggaatctccatttgttcaatgttggcgaggaagtcttgtgcagcaatatttgttttctccaattcttttccggttagcttttcccagatctgaactaattccaactgcgtgagaacgttgtcgggaggtctaatattcacggttttgtttaatgtccgtggatcgtttaacgttttcgcggtgtattttgcgatatcatcttcatccgcaaacaccacttttaca

SEQ ID NO: 246 - DNA, 468 bp, Arabidopsis thaliana
ttttttttttttcatcagaaaaccattgtctactaataatagtaataataagcaccgtcacaaattcaccatcattgtttgatgataatctattttacatggtagaagaattgcagacacccataaataaaagactcagtatatgttttctttattcccattcgatggttgaaggaggctttgatgtaatgtctagaaccacacggtttactccttgaacgctgttacagattttccgggaaacatcgtccagaaacttgtgctcaaaattgaaccagtctgcagtcattccatcttggctggtaactgcacgaagagcaacaacatgagaatgcgttctcttgtcaccttggactccaactgatcttacaggcaagaacactgcgaaagcttgccagatcgaatcatagagacccgcatctctgattgattggatgaatatctcatcaacctgacgaagaacctcga

SEQ ID NO: 247 - DNA, 468 bp, Arabidopsis thaliana
tacaaaaatgcagggagctctgtttatcaaaccaactattcttcttcctcttccttcttcagtttcttctccaaaactcacttttcttcttcctcacgcaaccaaagcttcaagactctcatctctcagatcaaacaactcatcatcatcatcatcatccttaacatctgaccctaacaccgtcgactataactcctccatcctttctgtttttccagctgaagcatgcgaagtaatcagtggatacgcttgttctgctgatatttaccctgaagtcaagctcgatacaaagcccgtctcacgtcccgtggcttcagagcccgttgacagagaatacgaagagtataacagccccaaaacggttttccgtgaagaggcctgcgatgatcttggaggagaattctgtgaacctgactttcaaaaagatgccaactagaagaaacaagattttatgtcatgtgaatatgt

SEQ ID NO: 248 - DNA, 468 bp, Arabidopsis thaliana
ttataatttctgataccaaaatcacatgtgctcatcgacaaaagctttgagatgattaaaggaagagcctccttctctcacagcctccgccgctaaatccttccacctcgtggcatttcctctaaactcctccgccttgtcttccataacttcctcaatgcaccgccgtatctcctcactatccaccaccacaactccttcttcttccttcttctccatcactcttacacctgttttccaacaatcttctaaaagcttcgcgttcatcatctgatcattccattgcggaaacgccaccaccggaactcctgaaaccaagctctccagcgtagagttccacccgcaatgcgtcacgaaacaacctatcgatctatgattcaaaaccctaaactgatcacaccatgaaaccaccattcctatctcatcgagctcttctctgaaactacttatgcaatcttcttccttctc

SEQ ID NO: 249 - DNA, 468 bp, Arabidopsis thaliana
  misc_feature (1)...(468): n = A,T,C or G
tttttttttttttgaattgtatatattcttttattcaatctacaaacacaacagtatttaccaacatatcaactttcaaaattgaatcgttattacgctgtgaaatttctctgttggattgatgagtttaatttactatatacaatatagtcttttgacgagactacacaaaccaaaaacttgcccttacatattttcagaactcgaaagcattgttgatctgaatggagaaagaaggtcgagcaacgtttggaagaggagtatcagctctaacaactattcctgttcgtccaatgttcccattccacttagaccgaccaaaggaaacagatgcaaatgttgaaggatgagctgtgaatgcgcnnnacatatcatattgatattatcattcaacgactgaataacttcggttttaatcccgggattgcttccaccaaatgtagagcacacactaagttgaattgcagg

SEQ ID NO: 250 - DNA, 468 bp, Arabidopsis thaliana
  misc_feature (1)...(468): n = A,T,C or G
gcttgatatcgaattcgcggccgcgcaaaaccccaaaatctgggtaaacaacaattcggttatggattctcgagattcgttatcatccgacgccgttagagnnncgtcgtcactctccgacgacgcagctgttctctctgtaacctctacactcgctaaaaccgctctttcctatttccaatctggaaaattcgaagagtgtatcgacgttttgattcagcttgatcagatgaaacataacgatcccaaggttctacacaatatggcaattgcagagtacttcaaggatggttgctcgaattccgagaaattggtggaagtgctaaaacgtgtcaagaaacagagtgaacaactttcttctgcagcaaaagaccaagtggaagctgcaaaccctggaactaacgtctctgtgtcaaaggatcattttgataggacagtaacaactctcaacattgcggttacctggtt

SEQ ID NO: 251 - DNA, 468 bp, Arabidopsis thaliana
  misc_feature (1)...(468): n = A,T,C or G
acagctcacaaaaagatcatcccattcccaatatgtcactctagacaagcttaaattattagtattgtctactgaggaaaaagctttttggtaaaatacacaagagctatataatacacatatactttctatattacatagnnnnnnnagagaggaggctcatgaagtggcttgagcttcctcagagctactagcagagacttgtccagtaccagtagcagtgtggccctcttcttcttcttcttcttcttcatcgcagaagatgctctcctcgcttgtgtccgagaacgcatcttcctcgtcttcttcgctaacttcttcttcgtttctcttctttctcaacactttaatgccttttctttgaatagaaagccttctccgttttcttgctttcctttttcctttgggaaactcttctccttgagagtgatgttgatgcagtcgcttccttcctcccttactgctttc

SEQ ID NO: 252 - DNA, 468 bp, Arabidopsis thaliana
  misc_feature (1)...(468): n = A,T,C or G
tggtttgccaccagatgtgtattactcaaacatgggatacacagatcctatacctctttattttcctgagtattctgaagaggatcttcgtcaaattttcttgagaaatcaacctaaccgaaaattgtactctgcattccttgacgttgtgttgaaaccattctgtagagtcaccaggagagttgaggaactgtctactaccttctcattattgttcagaaagttttgtgagccacttgatgatttagggatttcaccaaatgaagacatgaagagaaggctatatagccatcttaagccgcttattgctcattgtttaaatgagatattcagggtctctagtcaccctcatgatggcgaaaccagaggcgagagaaggcagaaagccagctacagttctgaaaaccnnnaagaacttgaaatattggacttccatatgtctacttcagcaaagtttcttcttctttc

SEQ ID NO: 253 - DNA, 468 bp, Arabidopsis thaliana
ccacgcgtccgcccagatctgtttatctcgttgattactcttgttatcttcctccggagagtcttcaggttaagtatcagaagtttatggatcattctaagttgattgaagatttcaatgagtcatctttagagtttcagaggaagattcttgaacgttctggtttaggagaagagacttatctccctgaagctttacattgtatccctccgaggcctacgatgatggcggctcgtgaggaatctgagcaggtaatgtttggtgctcttgataagcttttcgagaataccaagattaaccctagggatattggtgtgttggttgtgaattgtagcttgtttaatcctacaccttcgttgtcagctatgattgttaacaagtataagcttagagggaatgttaagagttttaaccttggtggaatggggtgtagtgctggtgttatctctatcgatttagctaaagata

SEQ ID NO: 254 - DNA, 468 bp, Arabidopsis thaliana
tttcttcaagttttatcaatggctggtgttactggaatcttaaagcttgaagcttggagcatcttgtgaagaagattaactagtttcttgtatttttcttttctggggttttgagtttttttttctcttccttattaccggaagtaatggcatgtcggagtatgatcgcttttagtttagatcctgaaagaaaacaaagtggaggacttaggacaaaacaagctggaagaggatcttgccgtggaagttagtctttgttcaaatccattttcctcttaaagaattttgaaattgcactgttgcaagtgaaaaagtttgttcttgttggagcttaaagaagagagaagagaaagagaaaagctatgggagttttactaagagaagctttaaggtctatgtgtgttaataatcaatggtcttatgctgttttctggaaaattggctgtcaaaattctagcttgttgattt

SEQ ID NO: 255 - DNA, 468 bp, Arabidopsis thaliana
  misc_feature (1)...(468): n = A,T,C or G
gctccacttcagcctgttgaatcgagcggaaaccgtatccccctcgggcagagaaagctttcgtgtgatgatgagtgtgcgaagctggagcgtaagcgggttcttcaagatgcatttgatataactcccccaaatctggaggcattacatttcagcgagaattctgctatgacagagattatttcagacctttataggcgtgatccaaagtgggtactggctgttgaagagcgctgcaagttcttggtacttgggaaagcaagaggaagcacaagtgcccttaaggtccatatcttctgcccgatgcagaaggataaacgagacacggttcgacttatagctgagaggtggaaacttggtgttagcaacgcannntgggagccaaaacggtttacagtggttcacgtaacagcaaaatcgaaaccgccaacaaggatcattggagctaggggtggtgctatctcgata

SEQ ID NO: 256 - DNA, 467 bp, Arabidopsis thaliana
tcgagcggccgcccgggcaggtgctgaagtctgaaagatgaggcaagtgataggtttaacataaattctcagcttgagcatcttcaagctaagtatgttggtacaggtcatgcagatttgagcagatttgaatggactgtgaacattcagcgtgatagttatgcttcatacattggtcactacccgatgctttcttactttgcaatagctgagaacgaatctattggtcgagaacgttacaacttcatgcagaaaatgctcttaccttgcggccttcctccagaaagagaagacgagtaagagcttgtgtgcatttgaaattaaaaaaaacattctacttcttagaagcttgtgtgcaatcttctttaactgctccaccaatgtaattgccgaaaaggcttcttcttgtttctagttcataatgcagttgttgatcatgatctaaacatttgtacctcggccgcgac

SEQ ID NO: 257 - DNA, 467 bp, Arabidopsis thaliana
tggattatcggagtcagcgattcatcgtcgctgataaagcttctacctttctcttcgatttttgttgtgagattcgattcgatcttaaggcggattagatcgaggtatgcagcaaggcgatcaaacggttctgagcttgagacctggtggcggtcgaggaaacagactatttggttcctcttcttcttcttcgtctctctcttttggctctctttcatcttcggatctacctctccttcgtcctcatggtggtgctcctgcttcctcttttcccttcaagggtggagactcgaggttcgatggccgtgaacgtgtgaagtacacccgtgagcagctcctggagcttaaagagaccactcaactctctgatgaaattctgagagtccaacgggaaactgcagctgaactgtttggtgaggaagggacttgggcacgtggagaaagtgtcgtaagcaatttggttcccg

SEQ ID NO: 258 - DNA, 467 bp, Arabidopsis thaliana
  misc_feature (1)...(467): n = A,T,C or G
ctttggcctgtttgggattccaatggttggagctgatatttgcggtttctcacatgataccaccgaggaattatgccgtcgatggatccagcttggagctttttacccttttgcaagagaccattcgtcccttggtaccgccagacaagaactatacctctgggattcagttgcttcttctgcaagaaaggttctcgncctcagaatgagactgctcccacatctctacacattgatgtatgaggctcatgtcagcggcaacccaatcgcgcgcccgctcttcttctcatttcctcaagacactaaaacctatgagattgattcccagttcttgattggtaaaagcataatggtttctccagcgctgaagnaaggggcggtagcagtggatgcatatttccctgctggaaattnnnncgatctttttaactattcctttgccgttggtggagattctggcaagcacg

SEQ ID NO: 259 - DNA, 467 bp, Arabidopsis thaliana
tgagagataatttaacaaatttcttcttcttcttctgtttctgaaccaccaaatctgcctttctcaattagctatgggcgtcgctgttctaaatccccaggattgcttgaaagatccattctctcacatgaaacaacatcgtaatcctagcgcatgtcccaacaggcagaagaagacggtctccaacaaccgtacacgccggagtcctcctcgtagtcaatcctccagatcttcttctcctcctgtagcgccgccgcttcctcctcctcgtgcggctgtctctgctttcgttccaaagggaacccttaagaagagtcttagcaataccgttgccgttagccaggtgagaatccttaagcgcggcgaagaaatccccaaggagacttcagatctggttgtggaaatgtcagatctgggatctactcgtcggattggaccagatccgggtttgattccgggtcagatcc

SEQ ID NO: 260 - DNA, 467 bp, Arabidopsis thaliana
gttgttgagattcagaaaccgcagaatcatcgacggctccctgttgatgatcaagggaagaatcggaatcgtgctccgtcgtctgatccggttgattcttcagctcctgttgttgttgatcctaatcagtatcatgcgattcttaagagcaagctcgagcttgcttgcgctgctgttgctcgtcgtgtgggaactgtgaaaccggaagattcgagtgcttcagctagcaatcaaaaacaagctcaaggctccattgtggcacaaacctcacctggtgcttcatctgttagattttctcccacaacaagcacgcaaaagaaacctgatgttccagccagacaaactagtatttcatcacgagatgattctgatgacgatgatcttgatggagacgcagataatggagatcctactgatgtgaagcgtgctaggaggatgctctcaaaccgagaatccgctaggcgctc

SEQ ID NO: 261 - DNA, 467 bp, Arabidopsis thaliana
gaagcaaaattctttgaggagagagcagctcttgaagctaagtatcaaaagttatatcagcctttatataccaagcgatatgagattgtgaatggtgtggtcgaagttgaaggtgcagctgaagaagtaaaatccgaacaaggagaagataaatcagctgaagagaaaggagtaccagatttctggcttattgcattgaagaacaatgaaattactgcggaagagataactgagcgagatgaaggggctctcaagtatctcaaagatatcaagtggagtagggttgaagaaccaaaagggttcaagcttgagtttttctttgatcagaatccttacttcaagaacactgtcttgaccaagacatatcacatgattgatgaagatgagcctatccttgagaaggccctcgggacggagattgagtggtatcctggaaagtgtttgacacagaagattctaaaaaagaa

SEQ ID NO: 262 - DNA, 467 bp, Arabidopsis thaliana
aaatgatcacacaccagtttcagagtgacatagaagataaaactaagaacaagaaaccaactagaatctcaagcaaacagagtaaacaaaagccaaaaggcttaatcaacttcttcaatctttgggccagcaccgccgctaccaccagcaggtgtgtcgtcatccattcctcctgcaccacccatatcaggcccagctccttggtacattcttgcaataatggggttgcaaagagactcgagctccttcatcttatcctcgaactcatctgcctcagccagttgattcccatctaaccattcaatagcttggtcgattgcatcctcaatcttcttcttgtcagctgcgtcaagcttagatgcgatcttctcgtccttgatcgtgttcctcatgttgtatgcatagttctcgagagcgttcttcgcatccaccttcttcttgtgttcttcatcctcagccttgtacct

SEQ ID NO: 263 - DNA, 467 bp, Arabidopsis thaliana
tttttttttaagagacaagagactttatgatcttcaaattgatgagaaaagaaagcaagtttcgattacacagacattgaaatcgataacaacaaagaaataagaaaagagaaaataaattaaaaagagataaaaagatgattgatggttcagacttgccacaaatatgatgaatgaataagcttttgaagatgagcgaaatggcaagagcgacctcttagatggattaagaaaaacatatggacgagaaagagaagaaattccaaaccctagaagaaaactagcagtttcactcaaaagatcactgctgttcctcggtcggttttggcgctgctgcttccttgatctcatccgcagcatcatcctgcatatcagatgtccagagagtgagattgtcacgaagaagctgcatgatcaaggtactgtctttgtatgactcttcaccaagagtgtccaactctgcaatc

SEQ ID NO: 264 - DNA, 467 bp, Arabidopsis thaliana
gtctttgcctgtgatcacaacaaactggtcaggaccaacagagtatcttacagagcggaatggttacccgttggtggtagaggagatgagtgaagtgaaggaaggtccttttgaagggcatcaatgggcagagccatctgtggataagctgagggttctaatgaggcgtgtaatgagtaaccctgatgaggctaaggttaaaggaaaacgtggaagagatgacatggtcaagaattttgctcctgaggttgttgctaaggttgtagcggatcaaatagcgagaatctttgatgagaaaataagaacatgacaggatctcacactttacttttatcaagagagggaacaagaattgtattttgattcaaagattgttcaaaaaagagcaaatatgtcaagaagagcttattctcagaaaaaaaaaaaaaaaaaaaaaaaaaaaaaaaaaaaaaaaaaaaaaaaaaaaa

SEQ ID NO: 265 - DNA, 467 bp, Arabidopsis thaliana
ttttttttttttttttttttttgggaaaagaaagagattcagtttctcatattaatctattattagcttattactagtatcacattaaatgtaagagtaagatatcagatcaacaaatcattagagctctttactgttgccatccgtattgctggtttctctgattctgccctcttcccgagctaccagagccaccatactgaccaccttgtgtgtagttaggaggtccaaccccgtacgggccaccactaggccctctaggaccagccacataaggagctccacgtccttgtggaggatatgatccactgctgtaacctcctcggctttgattataacccccgctctggtttccgctaggagggtagcggtttggaccaggtggaccacgcggcttcccatagaagttgtggctgggtcccgcaggtacttgtggtggtgcgttgttagtgggatggtttggacct

SEQ ID NO: 266 - DNA, 467 bp, Arabidopsis thaliana
cctcaggtgatttttgttccaccagctccgttacatcctcatatttacagcaatggacatatttgtttagatattctgtatgactcatggtctccagcaatgacagtgagttcagtctgtatcagcattctctcgatgctatcaagttcacccgaaaagcaacgccccactgataatgatcgatatgtgaagaactgcaagaacgggaggtctcctaaagagacaaggtggtggttccatgacgacaaggtttaatgatgacgaccttaagatgtctctcctttcagttacaaaagaggtttatataatttcccaagactgataatactaattgaaattcctcatggcctcccacttttttttctgtaacggatcattatgtataaatgacatctgaaatgtttcagtgtctgaattaacaccttgtgcttttgtcctttctgaagtgaaaaaccatggagatttta

SEQ ID NO: 267 - DNA, 467 bp, Arabidopsis thaliana
  misc_feature (1)...(467): n = A,T,C or G
tttttgtctgcaaaaaagatcttattttattaatttattaatctttgcgagggaaaaccaaatggaatacctctgcaacagtatctgaagaaaacaaatgggtactcatggtatatataatatataactcagatgttacaatctcgatctacgtataaatctcttccccggtctccgcctagaccgcccggtttctgatagctttatatcccaatcctcaacattcttcggaatataaacatcaaataagatttggcctagaactccattgggcttaaccgattcattggtttgagtattggacaaacaaatcaaatcttgtttgtgttcatcttgcacatatccgccgtctctgcccacgtagtaacctacggtgctaggtacgaagaaatgatcggttgtgacaagtggagnnnngttgaagcttcggttaagaccagaggttgattgccccaagctctgaattg

SEQ ID NO: 268 - DNA, 467 bp, Arabidopsis thaliana
aacaatgttatttataaggtgattttattcaagcaaactttacaatgatgtttttgtttgcaaggaatatatgatcaccacgtaattatgtatgtaggtaagagaaatcaaaatatataatttgtcaattagaaaccagagaaatcggagttgttattaccaccaaagagagtggacaagaggaccaaaacgccaatggcaattatgatgttgaggaagtaatttgtgggtaatggcttatctgggcttcctccaattgcttcatactctgctcttatcttctttttcatcgaatccgaaagctccttctttcccgtagaatactttgcagctacgaacttctctggaacgttttcaatgactatgccctcgggaggatcaaattttgcaccgagattgctaagcttggcatgggcttcagcgtagtccttgaaaaatgcagccacatcttcagcatacttctctgc

SEQ ID NO: 269 - DNA, 467 bp, Arabidopsis thaliana
ctacgtgaggggaaccatcctcggatacaaaaggtcgaagtccaaccagtatccaaacacgtccctcgtccagatcgaaggagttaacactcaggaggaggtaaactggtacaagggaaagaggatggcttacatctacaaggctaagacaaagaagaacggtagccactaccgctgtatctggggaaaggttaccaggcctcacggtaacagcggtgttgtccgtgccaaattcacatccaaccttcctcccaagtccatgggaagcagagtgagagtcttcatgtatccgagtaacatatgaagcaatgcaaaaatggcttaaacttataatttagccgccttggttttgttcactagtttgttattttgtattttgatattgaaagcatttcctttctttgtttgaagtgtttggagattctctaaattgactttgatcatggatccggtttttcatcccaaat

SEQ ID NO: 270 - DNA, 467 bp, Arabidopsis thaliana
ttttttttggattaaaagttgtactcgcatttgatggttaataagagacaagttgggaagtttttgattcaaacattttttcagcaaaatattacagataagagttgagacaagaaaccgacttcttatcatttaaaggctcacatcaaacagtttcatagtgagataacgcagcaaagacaatggatagataaaggtctttgcaattattttacttgccaccagtgaagagataatccaaggatgatcctcctcccggagctgcgtgaactttggtcgaaggacggtcagtgaggaagttgccggtgttctgtccttcagctctggcatagttgttaacaggagttttgataccagcaggaatctgcttgttaagctctgcaggctcaacagaagtagtagcagtcgtgagtgcggttgcagtcacagctgttactggtggtgcaggtccgttgttagactcagta

SEQ ID NO: 271 - DNA, 467 bp, Arabidopsis thaliana
  misc_feature (1)...(467): n = A,T,C or G
caggggaaggtccaaggatgtatatccggggtaagggcttttgctcaagttgtggctccatttgtatatagtccattgacagctctatttctctccgaaaatgcaccattctatttccctggattcagcattctatgcatcgccatctctttgatgatcggattccttcagagtcttctgataaaagatcatccttctttgcccttagtgaacataacaatcaacaacccttcaaaagcggaagcttgacaagaaatatatcaagaagcaaatgtaactgtaatattgtacaaatttgcttcaaattaaaagttcatttaaaacgaatacatagctagaagctgtaaaaataacttagttttcttacaaagattgtcattgcaaatgaataaaatcacttnnnnaaaaaaaaaaaaaaaaaaaaaaaaaaaaaaaaaaaaaaaaaaaaaaaaaaaaaaaaaaaaaag

SEQ ID NO: 272 - DNA, 467 bp, Arabidopsis thaliana
ccacgcgtccgtgaagatgcgagattgtggacccgagagcgtacaaaagcccgagaaaagacaaagatcggattcacagctagagtcgatgcgaaaatcaggcatctaaggtcgaaactgaacaagaaacagtcaaatctctcacatttttcagctcaagacgcaatgtcaccgagatcattgtagccttgtatagggtttgttgtttttctacaggtccaattctctgatgcatcagactttggagacaggtcttgaagctaattttgttgagagtttataatagagtgagatcatgtaaagagtagcctctgatgttttttctacttgttgggttcgaatttttctttatcttgtacacattatacttaggttttgtgtatacttaggacagaatgccaaaaaacataacaaagaatcttcctttgtgcctctaatcatttaattggtcatttatataaaaaaag

SEQ ID NO: 273 - DNA, 467 bp, Arabidopsis thaliana
  misc_feature (1)...(467): n = A,T,C or G
cggattcgtcttctctgccctaaaagaaaaaccctacgtgagctgcgtcagttctgggtcctccgcaatttgagaatcggagatatctcaagtttcgcaaagtctcgtggatttgatcttcgtctccttgatcgatggattcaccttgagcaatcgttgatcgagcttcgaagatgtcgaatcactccagagatgagcctagtactgccccgaagacagatcaatggtatgatcttgtccttggttcctctgccaaagatgactcctcccataaattctgcactttgcgatatgaatttaagccggcttcaatcgataagaacaggtcaggatcaatgcacaagnnganggataacagagtttcagttgagtttcagaataaccaaccaggtaaacccannnngacatttgaaggtagtagtgaggattacaaagaaagcgatgcggtgttgtttttcgatggggag

SEQ ID NO: 274 - DNA, 467 bp, Arabidopsis thaliana
gcggccgcttttttttttttttttatattttatttttcatttatataaaatataattatgattacataacaagaagatacatacttgccaactaaaaattaagatttgtcgagaaatttcctgaataattatgtcagagatattctccgggtaaaaaaaaaagcaattacatataacccgggatatttttttttaattattatttggataatttatttgacagatacctaaactacgacgtcgtatgtacttgagttggttctgggtccgtttggtctgattcgtgcacaagctcgacgaagaaaggcctgagtgtatctgtccataaatctcgtccagatgcagcggctctttgtctcttcctcacctctatcataaccagctcgtccgttagctggtttatctcaaccaccattgcgaagttacctttttgcccctcgatcttcatcccccatgtttccttcttc

SEQ ID NO: 275 - DNA, 467 bp, Arabidopsis thaliana
tattccttcagcgattgtactgacgccgttgtcaagctccgatttagatccgaaaactttagaaaccaaaccaagatcctttgcttcacctccagagaatctccgagcagttaaagctaattccatggcgttagcatacccaacgatactcggtaatcgctggagcgtaccaagatccgcaacaatcgctagatcaacctctttaatcgagaaaaaagcatcctcagagcaatacctaatatcacaagcggtaatcagatcaacaccgccaccgatacacgcgccgtgaatagcggcgacttgatcttacggcgtagctgctcgctagatcgtcctctgtcgttaccggaggaggattgtgttgagattgaagagagggaattgagatcgataccggagcagaagtgttttccggcgccggagaggatgatgacggagacatttgggttttggtcgagagatgagag

SEQ ID NO: 276 - DNA, 467 bp, Arabidopsis thaliana
  misc_feature (1)...(467): n = A,T,C or G
ttttttttttttttttttaagagatgattaagaaaattaccttgagattgaaagagtagatgacaaagtcaaaggaagaagagatagtgagatgtagaatcgcaagctttagttcttcaatcgagacaatagcttttaagatctgtcgttttcctctcttacaccgaacttttaagctcacatggttctgtatcaccgtagcctccacttctgtcgtatctccaccgccgaatctcgccgtaaatccattttccgacgtcgtnnnacgctagaaatagaagagttagtgcatgcaagagacgaagatgaagaacacgacgccgttttaggagtttcatcagttccatcctttcgtttctcagcttctagagattgcaagagttgctctagttccttgatgaaatctattgcccctcctacaatcgaagcttggtcaccccgttgaagaaacgaaggaggcatgagag

SEQ ID NO: 277 - DNA, 467 bp, Arabidopsis thaliana
ccacgcgtccggctgaaacaagttgtaattgtggtgcatttgttcttcagcgcagccgagaagattcgaaaccggagctaagctatgacgacgattgttcccacctccgaagaaaatccctttctcgctgttgtccgattcacttcccagctcgcctgggccgatgctggtcccgaggcagcagagccagaaattaccaggctctgtagggaggctgaggagtcaatggtagcagagaagtggcttgaattgtcttcgttaatggtcacttcagctgaattggtatcttctaagatatctgagaaagatcttgagtgtacctacaccatcatttgcagcattgtcaagaatgcgaaaagccctgagcaagtccttgaaatggtgaaagctatagcttccaaggttgctcaacaacccagtgacaaagcttcacttcgtttgaagatcctcttcaatctctataacct

SEQ ID NO: 278 - DNA, 467 bp, Arabidopsis thaliana
aaatataaagctaccaaagagaaaatggtgacactaacaccatcttctgctagtaccccaaaaacatcttttgatttcatgaagaataacaacagtcacagtctctatgtttcttcttcttcttacttgagcagcaaggaagatgctcttgtcacgaccaagaagctcatggaaccaagcaaaacactaaacatgagcattaatccaaaacaagaggagtttggtgatgagaagaaaatggtgaagaaagctcctgaagatccagagattggtgtgtttggagctgagaagtacttcaatggagacatggattcagaccaaggttctagtgttctgtctctgacaaacccagaagttgagagaaccgtcgtcgactcgaagcagagcgcgaagaaatctactggtactccgagtgtccggtctgaatcaagctggaatagtcagagcgtgttgcttcagaacaaact

SEQ ID NO: 279 - DNA, 467 bp, Arabidopsis thaliana
cttcccggattattttgactgagcctcgcggatctactgctgaggtgcttctatttggaggacaagtcatttcttggaaaaatgaaaggagggaagaactgctttatatgagcagcaaggctcaatataagccacccaaggcgatcagaggaggaatacctgtttgctttccacagtttggaaactttggtggacttgagcgacatggatttgcccggaacaaattctggtcacatgatgaagatccttcgcctctacctcctgctaacaaacaatcatctgttgatctgatattgaagtccacagaagatgacttgaagacctggccgcatagttttgaactccgtattcgcatttctattagccctgggaagcttactttgatccctcgtgtgaggaacattgactcaaaggcattctcctttatgtttgcactgcgaaactacttatatgtatctgacataagt

SEQ ID NO: 280 - DNA, 467 bp, Arabidopsis thaliana
gaccaaccgttcacaacaatgatcgcgcgacggatctggcgaagccaccggtttctccgcccattcagctcgtcatctgtttgctctccgccgttccgggtaccggagtatctttctcagtcgtcttcctctccggcgtcgcgcccattctttgttcaccctcccactttgatgaaatggggtggaggaagtagaagctggttttcgaacgaagccatggccactgattcaaattcagggttaattgatgtgccactagctcaaactggggaaggtattgctgaatgtgagcttctcaagtggtttgtcaaagagggagattctgtggaagagtttcagccactctgtgaagttcagagcgataaagcaactatagagatcacaagtcgttttaaagggaaagtggctctgatttcacattctccaggtgacattattaaggttggagagactctggttaggttggc

SEQ ID NO: 281 - DNA, 467 bp, Arabidopsis thaliana
  misc_feature (1)...(467): n = A,T,C or G
taaagctgactcaacttgagcaggagctgcaaagagcaagacagcagggagttttcatctcaagttcaggagaccaagctcattctactggtggcaatggggctttggcatttgatgcagaacactcacgatggcttgaagaaaagaacaggcaaatgaacgagctgagatctnnnctgaatgctcatgcaggtgatactgagctccggataattgtggatggagtgatggctcactatgaggagcttttcaggattaagagcaatgcagctaagaatgatgtcttccacttgttatctggaatgtggaaaacaccagctgagcgatgtttcttgtggcttggcgggttccgctcatccgaacttctcaagcttcttgcgaatcagctagagcccatgacagaacgacaggtaatgggcatcaatagcttgcagcagacgtcgcagcaggcagaagatgctttatct

SEQ ID NO: 282 - DNA, 467 bp, Arabidopsis thaliana
taacacgctctaaatccaaagctgagcaaatatttcctgccaaggacttcccaggtattgtgattgcagaagaatcggagtggaagaactgtgtacaaggctctactgctgttgtcaacttggcaggactgcctattagtacaaggtggtctcccgagatcaagaaagagattaagggcagccggatccgtgtcacttccaaagttgttgacttaatcaataattcaccagcagaagctaggcctaccgttctagttagcgccacggctgttggttactatggtactagtgagacaggagtattcgacgaaaatagtccatcagggaaggactatcttgcagaggtttgcagagaatgggaaggaactgcattgaaagcgaataaggatgttagagtggcacttatccgcattggtgttgttcttggcaaagatggtggagctttggccatgatgataccctttttc

SEQ ID NO: 283 - DNA, 466 bp, Arabidopsis thaliana
tttatgtaaatagtgtttcaacatctctatcttatgcacaaataaaagatcttttggcttaagagttaaaacaccaactgtgtttgcggttggaggatacaaagaaatgatggttctctgtatcaaaccctcatctatggaagtctttttttccatagacaacattctcaaacagtaagttacaaatacagaatcgatggcactttcatcgcgaggtattgtgtttccaccaccaagacttgttttacgtatacatgtagtcatcctatagcttctggataaaggaaagaacgagatctgtatgtacagagaagagttgtgtatccacaaatagcttcatgaacgggcgctgacgactgggaaaggagtcgatgaaactttcctttaggagaagtgataccttatcgttgttggattgcacatttgttatggtgtgtgactgcagattagagcaaagagaatcaag

SEQ ID NO: 284 - DNA, 466 bp, Arabidopsis thaliana
ctttttttttttttttttagtacaaaaggatttcattctgtctgaataactgaaaaacaaacataagtgtttctctcttcaaacatcaagatatttagccactgtctgaacatctttatctcctcttccgctgaagttcaagaccactctcgtcccgtctgataatgtgggacatagcttctcgaggtaagctagtgcgtgtgaggtctccagtgctggaatgattccctctaaccgcgacactctcttgaacgcttccaacgcttcttcgtcggttatgctatagtattcagcccgtcccatgtctttaaagaaactgtgctcgggtccgactccagggtagtccaatcctgcactgatggagtgtggttcaatgatttgtccatcatcatcttgcagcaagtaactcatagctccatggaggacaccaacatctccctttgtcaatgtagcagcgtgtttgcca

SEQ ID NO: 285 - DNA, 466 bp, Arabidopsis thaliana
gtagtcaggccatgaatctctcagaagcttcaataacttctgtgctttcttcttcgctctctccgtacactcactctgcaccatcaacaacaactgtaccaccactcccgcccccgccgcttcctccctccacctttcctccgccgtacaaagcgctaacaacgcccccgccgcatactccgtcgcgcgatccgaaactctcaatatcgttttaactaacaacggcaccgttaaagcgtgctcaccgaacgccgcgcatccttccggcgttcggcagagtagctccaccgtcgctaaggctcgctccgtatcgcatctatcgaaatccgccgcgagtctgtctattagaatctccggcgcaccggctgtgatcgcgatgtgtcgcgtcgatttcactgaacagagcgcgaacagagttttgattccgattttgagagctcgtcgtgacgaaatcggatttctcaga

SEQ ID NO: 286 - DNA, 466 bp, Arabidopsis thaliana
agaaggttttggagatagaatcttttgttcttcttttgtccctccttgctcgatttttgttacgtgtgaagcaataaaaaaaaactgatatagctaaatcttccatccattcagaggcttctaaatctgatctgacatggaacaagtgtttgctgattggaattttgaagataattttcacatgtccactaataaaagatcaatcagaccagaagatgaattagtggagctattgtggagagatggtcaagtggttttacaaagccaagctcgtagagaaccgtcagtccaagtccaaacccacaaacaagaaaccctaagaaaacccaacaatatttttcttgacaaccaagaaacagtacaaaagcctaactacgctgctctagatgatcaagaaaccgtctcctggatacaataccctccggatgacgtcatcgaccctttcgaatccgagttctcctctcat

SEQ ID NO: 287 - DNA, 466 bp, Arabidopsis thaliana
  misc_feature (1)...(466): n = A,T,C or G
tctctcttcgtctccaaataaaccacattagtcttttcagattttttgtacacttccttcatcccccacccatctctctctctctctcatccttcctctttcttctttgcttgcccttttctttttattttattcttccaaaatcaaatagttccttctttgatctcattgggataactaaaagtttcaagaagagaaacatatcattgaagagagaacccacacaaaaaaaaatgtctgtagatttctcatctgagcgtgtttgctatgtccactgcagcttctgcaccacgattttagcggtaagtgtaccatacgcnnntttgttcacacttgtgacggtgagatgtggccattgtaccaatttgctatccctcaacattggagtttcacttcatcaaacctcagctcctcccattcaccaagatcttcagcctcatagacagcacacaacctctctggtgac

SEQ ID NO: 288 - DNA, 466 bp, Arabidopsis thaliana
cgtggactatctgcatcatatgttacttctggaagcatgaatcaaaatgtagaagttggccagggaaatctaaagttacgctattcagaagaaggagttaaaattactcgtcacttaagtaccaaaaatcaggttactgcagaacagtcatatgcttattatattggaagcaatggaactgacaaggatcctcaggcttctggagcttacgtttttcgaccagatggtgtgcttccaattaaatctaaagaagaggctcaattgactattgttcaaggacctttgttcgatgaagtgcaccaggagcttaactcctggatatcacagattaccagagtgtacaagggaaaaaaccatgctgaaattgagttcacaattgggcctataccagctgatgatggtattagcaaagagattatcactaaacttacaaccaccatgaagacaaatggaacattttacacag

SEQ ID NO: 289 - DNA, 466 bp, Arabidopsis thaliana
ccacgcgtccggtgtcttgctgctcagaaataagtattacattgtaatatatcgtgggaaggacttccttccttcaagtgtggcagctactttagcagaaagacaagaattaacgaaagagattcaagatgtcgaagagagggtaagaaatcgtgagattgaggctgttcagcctgttggtgacaaagtaccagcagaagctggcactctggccgagttttatgaggctcaagcccgatgggggaaggaaataactccagaccatcgtgaaaagatgattgaagaagcttcaagggttgcaaatgctagagttgttaaacgaatacaacacaaactaaaccttgcccaatcgaagtttcaaagagcagagaaactgttgtccaaaatagaagcctctatgattccaaatggacctgattatgatcaagaggtcatctccgaggaagaaagagctatgttccggaaa

SEQ ID NO: 290 - DNA, 466 bp, Arabidopsis thaliana
gaacactatctctgtctatgagactgagactttcagcctaatagacaagaaatccatgaaggttgataatgttgtggatatttgctggtctcccactgattcaatcctttcattgtttgttcctgaacaaggtggtggaaaccaaccagccaaggttgctctagtccaaatcccgagtaaggtagagctgaggcagaagaatctcttcagtgtgagcgactgcaagatgtactggcagagtagtggagagtatcttgctgttaaggttgatcgatacacaaaaactaagaagagtacatactctggatttgagcttttccgtatcaaagaaagggatattccaatcgaggttcttgagctggataacaagaacgataagatcattgctttcgcgtgggagcccaagggtcacaggtttgctgtgattcatggtgaccagccaagaccggatgttagtttctactcg

SEQ ID NO: 291 - DNA, 466 bp, Arabidopsis thaliana
gattgcagaggcaggagccatccctgttttggtcaagcttttgacctcagatggtgacactgaaacgcaggaaaatgctgtcacttgcattcttaacctctccatatacgaacacaacaaagaactgatcatgcttgcaggagcagtcacatctatagtgctagtcctccgagctggaagcatggaagctagagaaaacgctgcagctactctctttagtctttcgttagctgatgagaacaagatcattataggcgcatcaggtgcgataatggccttagtggatctgcttcaatatggaagcgtcagagggaagaaagacgcagctacggctctgttcaacttgtgtatttaccagggaaacaaaggcagagcagttagagccggtatagtaaagccattggtgaaaatgctgacagactcctcgagcgagaggatggctgatgaagccttgaccatactctcg

SEQ ID NO: 292 - DNA, 466 bp, Arabidopsis thaliana
  misc_feature (1)...(466): n = A,T,C or G
tttgttcgatttcttgccattccgttcacaactctctgcggcaatagccatcatacgaacatcagaggagacgcaagagaggttcagagatgcgaatgggaagtgtgtgggagccacaataatttcatctacactgtttgctccctcatacggtttgaccaacaatggcattatattcactggttatcctgtcgttggaagccaaaaccgtatgatgnnntcaggatcgtgtctagacagccttcaagatggattgatcacggcgtgtgcatgggactcacgtataaaaggcgaattttttcatcaaacaactttgagtgtccctctcacccaagttaaaagttttatcagcgacatcaaatcacttgtaaagatcgaacaaaaatctctgtgtggccttgagcttcactatggtattctaatgcgctatgtcacatcatctcccgcttatctagggaaagaaacc

SEQ ID NO: 293 - DNA, 466 bp, Arabidopsis thaliana
tcgagcggccgcccgggcaggtacttttattgaggttgcttatctcctcatgtatggaaatctgccttctcaaagtcagctagctgattgggagttcactgtttctcagcattcagctgtgccacaaggagtattggatatcatacagtccatgcctcatgatgcacacccaatgggagttcttgtgagtgccatgagtgcactttctatctttcaccctgatgcaaatcctgctcttagtggccaagacatttacaagtcaaaacaagttcgtgataaacagattgttcgcattctcggaaaggcaccaacaattgcagcagctgcttatttgaggacggcaggcaggcctcctgttcttccttcggccaacctttcttattcagagaatttcctctatatgctggattcaatgggcaataggtcttacaagcctaatcctcgtttggctcgagtgctggacatc

SEQ ID NO: 294 - DNA, 466 bp, Arabidopsis thaliana
gagtcaagtacttcattgttgatgcattcgctgaatctgccttcaaagggaatccagctgctgtttgctttctagaagacgataacgagagagacgacgcgtggcttcagtctcttgccaccgagttcaatatctccgagacttgtttcctcactccgatcatcggagacttgcctcgcttccgtctccgttggttcactccagtcgctgaggtggatttgtgtggtcatgcaactttagcatctgctcacgttctcttctcaactggtttggttggttcagagacagttgagttcgacacattatcagggattctaacagctaaacatctcaaaaatgatgatgatggagaagaatcaagtatcgaattggatttccctgttgttccaacatatgaagtcaactacattgatgatgatctctctttgttctccaaagccttgaatggagctaccattcttgatgt

SEQ ID NO: 295 - DNA, 466 bp, Arabidopsis thaliana
ttttttatcagaagaagaaaaaagtgattgaattaaagaaatttcaaactcaaacaaacagctcaccatcttggcagtatttcaccaaactcaaataaaaacactatacatgaaattaattcatcaacctcagattatgatacagaaaatagatcagataaaaaatataacaataacaataaaataaaatattgaatatatatgtggatgatttattttatatgataattttttcctcagaacttgaaaccgaggctgggccatttcttagcagaagactctttcttcggaggtcttgcatttggatcaatcagattctggagcgacttggctttgtagttccgcgaccgcccagcttccttcaaaagctcggccaaacgtttcttctcgtcttcaaaatccggattcgcagtcccgagcttttcctctctcagcttcagaacctgctctaatatctcaatcgcat

SEQ ID NO: 296 - DNA, 466 bp, Arabidopsis thaliana
aatctttcatcaagactgttgggtcgatgtctctcctattccaggggctctagtcatcaacatgggagatttcttgcagctaataacgaatgacaaagtcataagtgtggagcacagggtgctagcgaacagggcagctacaccgaggatatcagtagctagctttttcagcacaagtatgcgtccgaattcaactgtttatggaccaatcaaagagcttctctctgaagaaaacccttcaaaatacagagtcatcgacttgaaagaatacacagagggatacttcaagaaaggcctcgatggaacatcgtatctgtcgcattacaagatatgaaagaaaaaaacaattgaaagagtaaatcatctcaagtttattgtaagatattggttcgtttcatgcatctattgggttcaggtactagtccaattgtcagatcttgacaaataagtaaaccatttcctttgt

SEQ ID NO: 297 - DNA, 466 bp, Arabidopsis thaliana
  misc_feature (1)...(466): n = A,T,C or G
cttttttttttttttttttttttttttttttttttttttttttttttttttttttttttttnntaaaaattttggggcaaatatatagagggacactatacaattattaactctgacaaaaacaataaaaataataaagagagaagaatgacaacaatcacatgtttcacgacaagacaaagacgaacagcgagataattgtacactacagctaattgctagccaaacatctcttggaaagaaactgttgccttacgggtttaatccaatttgatgccatttttctctacttcttgcttttttggagctgccggaaaatatttgatcccggtaaggtcacctgctttgcttataacctgtagggcttttataagatnttctcttgagtgagatgcggatatgcaaatacgagccctggctagcaataggggtgtagctgggaaaccgacgaccaccaccgccaagt

SEQ ID NO: 298 - DNA, 466 bp, Arabidopsis thaliana
ttaaaagaaccatttttattctcgtcgcgcaacaacaaatccagatcgaaaaaggaagaagagatcgaaatggcgttgagaagggtttacagtgaaatcagagggaagaaggtgacggagcttccaggctatatcaaatcgactttttcaatggagaccgtgaagacctctgtgaagagaggactcgataactacaacgaaaaatacattcagaccagctccgttgatcctatccttcatatctgcttctacggcatggctttctcttaccttgtcgctctccctaatgagcgtcgccatcttgagcatcagcagcatgctaaggagcacggtggtcattgatctcgtgggaatcgtttcgatctcgagatgattttaggggggttgctgtgaaatctttctctgcttgatggtgacgacgactcaagaattgtgtcttattgtttcgttttcttgaattttcctg

SEQ ID NO: 299 - DNA, 466 bp, Arabidopsis thaliana
ccacgcgtccgcttctcctagaatcagagagttcaaaatcaagggcccaagaacttggtttaaagttggccggtagcgagaaacttgtcgataaactatcattaagagtcaaagagtttgaagagaaacttcaaaccaaagcaattcagcctgatattgttcaagaaagaagcatcttcgaaacaccgagagcaccttctacctcagagatatccgagattgaggacaagggagccttgggaataaaatcaatatcaccggtgcctacagcagcacaagtgagaacagtgaggaagggatcgacggatcatctttcaatcaacatagattcagagtccgagcatctgatgaacaacaacgaaacagatgaagataaaggacatgttttcaagtctctcaacatgtctggtctgattccaacgcaaggaaagataatagcagatcgggttgatggaatatgggtctc

SEQ ID NO: 300 - DNA, 466 bp, Arabidopsis thaliana
catgacatagtacagagtattattagtagtcacgtcaactacacagataaaggaaagcgaagagcttaaccttggacttcgactcggactcatacaagcctagagactagagatcacacatagtcacatagatacaggtttccacagaatatgtgactcagcataacgatacagagatcacatatccatgtcggcaaagatctcttcatcctcttcatatggaggactgtcagtgagaaatgcatcatttgccaggttactcgtgcaggagaaacgaaaacccgcaacgcgcttcagttttcggttgtagaataagaaacagaaagaccatattgctccttcctcgaggaaaggatcagcattaggatttggattgtaaacatatatctcacattcagctagttttacgacctcatcaagagccttgtagatcacctcaagaagggaaccatcctcattcctctca

SEQ ID NO: 301 - DNA, 466 bp, Arabidopsis thaliana
tttttttttttgggaataatctcttcaaaactaatatcaacagtcttcttttcagagatgtagtaaaaatagtgttataactcaaaactagttcacaataacatcatcagacatagtttcttaacctgaaatatttcatttgttggccttcgcagatagaaactgtgactctctgtgtctcagttcttcagttccatttattgatttcctgaattgcttgtttctgcagcaagacgagcactttccttctcaaagaaatcgaattcttggagtatcttagcaagcttgtttgagttgtcttcttttatattcgcagggaccttctcttcgtaagtagacacactcatcatcttctgcaacttctctttttgtttttgtagttcaccaatcttgtttctgattttttcttgttcagcttctgtgttaatggctccgtccacttcaagatatactttgaggttctcgt

SEQ ID NO: 302 - DNA, 466 bp, Arabidopsis thaliana
  misc_feature (1)...(466): n = A,T,C or G
gcggccgcggatttggctgtggagatgtcttcacttacctccgtcgaattgaattttctggttttccgatatcttcaggaatcagggtttacacacgctgcattcactctaggttatgaggcagggattaataaatccaacattgatgggaatatggttccacctggtgctcttatcaaatttgttcagaaaggtcttcagtacatggagatggaagctaatttgagcaatagtgaagtggacattgatgaggatttctcattctttcaacccttggatctgatttcaaaggatgtaaaggaactgcaggatatgctgagggaaaannngaggaaagagagggatatggagaaggaaagagacagatctaaagaaaacgataaaggggttgnacgagaacatgaaggagatcgnaaccgagctaaggaaaaggataggcacgagaagcagaaggaacgagagaggg

SEQ ID NO: 303 - DNA, 466 bp, Arabidopsis thaliana
  misc_feature (1)...(466): n = A,T,C or G
cttgatatcgaattcgcggccgcaagtttacacagaagaagggtttagggtacaacatgcagaaacattatctatatcacaaatacagtaatatttaaannnaaaaacttgtttttgttcttcaaagatgatttcatgtgcgtaattttgcatagccaacgaaagagtttggtagtatagtttcctcatcagtcggtgtagggttgagagtccatgcacaaatgcactagctttctctggtactgttgaaagtattcacaaaccgctgtcacttcttccttccctgattcaagaccaggcagatcgggcagcggtactgtgccatcaccagaagcagattcagactcctcgtcttgggttgatagctcggttatgatttctgaatgaatctcctgacacgcgaggacaaacatggctactgtatcaggctgttgcacctctctgagagctgcaagcgcctcttgca

SEQ ID NO: 304 - DNA, 466 bp, Arabidopsis thaliana
  misc_feature (1)...(466): n = A,T,C or G
ctagagcggccgcccttttttttttttttttttttgtttttggaaaatcaacttttcttttttaatatgccaaccatttacatctaatacattgcattgatttctttcttctcttctatcaccatttttcctaccacaaccagactctttaacactactaacaaagaaaaataaataaagtcatagaacctaaaaagactcttttcttcttcttcttctcctacagtacctacccactcactctcaccctctgttcagcatctcacaaatacactaaacaactcctaaatctaaaaggtattaaataacgaactcttcttcttgcttaaactagcactctctttctatctacctattacatttttctttctaactacatctgcttcctaagtttatcatcgaaagannaaacaaatcctttccttcagttttccccttcattcctccctttacaccctcagctaaa

SEQ ID NO: 305 - DNA, 466 bp, Arabidopsis thaliana
gcggccgcccacaaagaatcaacgccaaatcacaaaatctatccaaaagagaggtttccaagttaacagactcggctggtgatatttgaagaaagagacttgagctgtgagttccatttatcaaccgccttatgcaacttccttccattgccactgtcgcctctcagtaagtaacggttcatttcatcaatgtgaccatcgattctgctgtcgagtatcagcgacactagtaactccgtcacatccgtctctggcacgttcagttcctttgatatgaacggaatccctatctttgtgtatggcttaatcagcttcagtaacacttgtgttctcactttcttcagcagatcttccatgtagtttctgatgaatggatcatccattatcgtcctccggttactctttagtattctctcaaactctatgatctcatttcgttgatatgctgcgatcaaatttgtcattg

SEQ ID NO: 306 - DNA, 466 bp, Arabidopsis thaliana
  misc_feature (1)...(466): n = A,T,C or G
cttacgagtctcttcaagaggagacaaacagtacaaggagaaccttacatagagaaacatagcacaagagatgcgattaaaagggtatttaaaaagcttcatggagcttcttcaaagacaagatatgatgatgaagatgattctatgtccaagaagaagaaagatctcaaaaaggtttagtcttctttagcttaaagcattttcaaatcttacccaaagagattagtctgaagaattttgaatgttaatatggtttctgttttggctatagaatgttcaaacctgccgacgtaaagtccaccctgttctctgtacacctgcaactgcacgagacgataaggagatagatgacagaagaaaagtggatctcaaggtccctagtcttactggaggggttctcggtgcaagttccatgnccgtgaacacgaaaagagaaaactggatcaagaccgacacagagtgtaag

SEQ ID NO: 307 - DNA, 466 bp, Arabidopsis thaliana
tctggtggaaagcatccatataattgtaggccttatggaaaaccttcaagggcgtggaactttgagggtatgtaactggtttcaaaaaaatcaaggaaagcaagaaagaaaaaacccaagggaaataaggaggccacagtgcataaactgtctgaaaatcatccaagtacttcaaacgaagctagcacagcaaaaagcataccgatggttgattcaacagtttcaacagaggatggaccaatggatgtgcctcccaataaaccagaggcatcgaacctagagactgaaactgatgaaactcaacaaatgcacagcccgaagtcaaataatgtggttgatgatctgtctagcggcagtgatgattcttctgatggcgaagagcaaactgcaacagatgaagttgattttaaggtttccacatttatttctgcttttgccagcaacagcattattcaaaacctatgct

SEQ ID NO: 308 - DNA, 466 bp, Arabidopsis thaliana
ctcgaatccgttcatcaacatctctcttccgtcacctcaacgcatcaccacaaatccgatcactctcctcggcttcaacaatcctctcaccagattcaaaaactcctctcacaagcaaagaaaaaagcaaagcagctctctctcttctcaaatccgagaaagatccagatcgtatcctcgaaatctgccgtgcagcttctcttactccagattgccgcatagatcgaatcgctttctccgccgccgtcgagaatctcgccgagaagaaacatttctccgctgtatcgaatctcctcgacggattcatcgaaaacagaccagatctcaaatcggaacgttttgctgctcacgccattgttttgtatgctcaagctaatatgcttgatcactctttaagagtttttcgtgatctcgagaaattcgaaatctctcgtacggtgaagtctttaaacgcgcttctctttgc

SEQ ID NO: 309 - DNA, 466 bp, Arabidopsis thaliana
atctggaatcgttctctgtttctcaaacgttcttcaaacttccgagctagtttctctacgaaacgtgttgggacccataatggaacattccactgcgacgaagctttagcttgcttcatccttcgtcgttccaatagattctccgatgctcaaatcgtccgaaccagagatcatcaggttttggagaagcttgatgcggcacttgatgttggaggtgtgtatgatcctcagagtgaacgttatgaccatcaccagaaaggatttagtgaagtgtttggccttgggtttaatactaaactcagtagtgctgggcttgtctataagcattatggattggaaataatttccaaggagcttcaacttgagcagagacatcctgatgtctttcgattgtttctagctgtgtacaaaaacttcattgaggcagtagatgctttagacaatggtatccatcaatatgatactg

SEQ ID NO: 310 - DNA, 466 bp, Arabidopsis thaliana
  misc_feature (1)...(466): n = A,T,C or G
atacaccttcttcttcttcttcttcttcttcttcttcacagctgggtttcttctaatggcggaaccgattccctcatcgtctctgtcaccgaaatctctacaatctcctaatcctatggaaccttctcctgcatcttctactcctttaccttcatcatcatctcaacaacaacaactcatgacagctccgatttccaattctgttaattccgctgcgtctccggcgatgactgtaactaccaccgaaggtattgtaattcagaacaattcgcaacctaacatctcctctcccaaccctacttcttctaacccaccaatcggagctcagatcccgtcgccttctcctctctctcacccttcttcatctttagatcagcaaacacagactcagcaactcgttcaannnactcagcaattgcctcaacaacaacaacagattatgcagcaaatctcttcatctccgatt

SEQ ID NO: 311 - DNA, 466 bp, Arabidopsis thaliana
gattctacatgaaagctttgctcgtaataatttcaacaaattcgttgactctacaaccaaaaccctcatgtgctaactttcaagtaagtatatgtagttttttgctcgaaataacaaaaaaaaataagaacaaaacatcatcttgtgtttgatccaattcttgaatcttgaaacattcttttgagctctctataactatttaaaaaatggcggatggatacgagaaccatgctcctgaaaaccttcaggggaaatatcaagcaatggttgtttgttgtattcttggaattggatctctcttttcttggaatagtatgctcactatcgcagattactactatcaagttttcccggattatcatccttcaagggtattcacacttatataccaaccaattgcccttggaacaatcatgattctcgcataccgcgaatcgaaaatcagtactaggaaacgtatccttac

SEQ ID NO: 312 - DNA, 466 bp, Arabidopsis thaliana
  misc_feature (1)...(466): n = A,T,C or G
ccacgcgtccggattccgcgtctagtgataacaagtcaaacttgacgttatgctcggatgtggttgcctcttcctccccagtttctcaactgtgtagggaagcttcaacttcagggcataacccagtttgcaccacacatagtagttggacagttattttaaaaacagcttctatggctagcggggcaattaggagatttcaagaccgtgtattagggccgagtaggacgggtatttccagcagtactagtgagatatggctcctgggtgtctgttataaaatctcagagggtgaatcctcagaataagcagatgctggccgtgtattggccgcattcagacaagatttttcatccttaatactgatgacatatcgtagnggttttgagcctattggagacacaacttatactagtgatgtaaactggggttgcatgcttcgaagcggccagatgctcttcgcaca

SEQ ID NO: 313 - DNA, 466 bp, Arabidopsis thaliana
ctttgctcttttggttgtaattttggttttgaatagaattgagctgaagagttaaaagagatgaagagaagaaggaaggatctgaaacaagcggcggagtcagagcaggaggaatgtcagagcattgcccaggtcgtctctctcggagattccgatcaaattcagccgccacccaacaagaaagaagaagaagatatatgtgaatacttactgcagaattttgatcttgatcatgtgatggaaattcttatgagatttcctttaacctccctgacgaggttcaagtgcgtctctaagcagtggtcatccctcatttctagtcgatatttttgcaaccttttatatactacggtcacacgacaacaaccacgcctatacatgtgtttaaaggatgacggcgggcaccgtgtactgctatctatatcatcaccgtctcgaggcaacacttctttcgtggtggtcgagc

SEQ ID NO: 314 - DNA, 466 bp, Arabidopsis thaliana
  misc_feature (1)...(466): n = A,T,C or G
ccacgcgtccgacaaggctcatagtaatgcagaagatgacatcctatttccagctctagaatcgaaggagacacttcacaatgtcagtcactcttacacgctcgaccataaacaggaggagaagttgtttggagatatttatagtgtccttaccgaactttcaattcttcatgagaagttacagagtgattctatgatggaggacatagctcaaactgacactgttcggacnnatatcgatnacggtgactgcaacaagaaatacaatgaactggctacaaagctacaggggatgtgcaaatccattaaaatcactttggatcagcacattttcttggaggaactggagctttggcctctatttgacaaacacttctccattcaagagcaagacaagattgtgggtcgtataatcggaacaacgggtgctgaagttcttcaatctatgttaccatgggtgacgtct

SEQ ID NO: 315 - DNA, 465 bp, Arabidopsis thaliana
  misc_feature (1)...(465): n = A,T,C or G
tttttttttttatggctttaaatagcttaggttcttcttattcatttatcaactggtataacacaaataagtcacgccgagattaatatgtcgttatacattgaataaaaataaagcaagatcataaatccacaaattgtttcaatatgacaagagccaaatagataatttgggagtgaaactagttagttggaactctgcctttgaggaagttcttgcaaatcntctcccaaagcttcctgtctgctcccctattctccatcgttgccttagccgcatcagcaaattcttgcttgacgtagcctagagcaagaacacgatcaacaatctcgaagagaatctctttgttatactcaggatgtcnntggatacagaacaaatgatcctcaatcgaatacatctccacctcgtagttcttggaatacgcaagcactttagcagtttcgggcagcaccaacacttcgt

SEQ ID NO: 316 - DNA, 465 bp, Arabidopsis thaliana
tcaatgaaggcttcgatgagaagattatatgatatctaccatcagctaatacctaaaaatggctcatttcacaaactccttaaatggatcctctaacattattaaaaaaacctaaacgttagtagtagaaccatcttcttgaatcaaagactcataacgaataacgaggagaagcgcaacggaggacctcgagaaagagagtttcgtcacaagcaatacaaagcttggaatctccggaagtgaaatcgtcgtaagcttcatcttttgattgatcaagcaaagctctgaagatgggatcgtgaagcaacgtgatctttataacgaacctcttataagtttcctcatctttaccaacgtacaccacaaggtgtccctttggtacgtcatgtggtatatgatattgatccttaggatttccggtggcgacgcggtgtttggcaactctgcttgacatttgcttccatg

SEQ ID NO: 317 - DNA, 465 bp, Arabidopsis thaliana
  misc_feature (1)...(465): n = A,T,C or G
ataattttattggattttgaaggagatgacttcaaacaaacaaaaatgaatcccagtaggtcgtggcattacaaggcatctctactcaatgcaaacaatgtctaatagtcttatctaaagcctgcaactgcaagattctctatatgttgtataaatatatatatcatgacagtcgctctccattacttcgataatggttctttttttcttcgaattctttctatttacactgactaactcctgtattagcttcgttgactaacctggtcacaagtccttgaagcctctgagctccaaagctaggaacaatcttagccacattaccgaccctggagcattttggtttcccactgcaccatccaccaggagtaaaactatctttatcattcctccgtttaagtaattccttatcnnncttattaagtacttcatcatctcttctgaatttcctagcaaacgcagcac

SEQ ID NO: 318 - DNA, 465 bp, Arabidopsis thaliana
gagacagaagaagagcatatagatatgcattttttaagtaaacatctctcagaagaattttaaaaggctaattaattggaataataacaaaaataggattgaaatgagttttacttggtgtacaacacatcttcccatgggtgacgatacagtggctgcttcaatctcttctgatcaaacgtgtgcccgatcaaaccgatggagcgagcaagaacaaacagaccgttgagataaccgatctgaacaatctcgtcaatctcttgtttagtgaacatcccacttccagctagaaggtccaagaagagagatccaatggctccatcaacgttgagtacgaggttgtttgcctttgagagcgtgtatgtctccactgtcactgcgtactccatgtacttcactgatgggaagttggaccgagcaaatttctgaagaagctccactcttttgtctctgttgtctctgctc

SEQ ID NO: 319 - DNA, 465 bp, Arabidopsis thaliana
  misc_feature (1)...(465): n = A,T,C or G
gtttccgcgggaaaaccttcttcttcgttgaccttacacgagttttgttgattcggcagggggatcgacgacggagatggcgattctgtacgccctcgtggctcgtggcacggtggttctttctgagttcaccgccacctctacgaatgcgagcaccatcgccaaacagatcctcgagaaggtccctggagacaacgacagcaacgtctcctactctcaggatcgttacgtcttccacgttaaacgcaccgatggcctcaccgttctctgtatggccgaagaaaccgncggaaggaganttccttttgcctttttggaggatattcaccagagattcgtacggacttatggcagggctgttcatacagcactagcttatgcaatgaatgaggaattctctagagttctcagtcagcagattgactattactctaatgatcctaatgccgataggattaatcgtat

SEQ ID NO: 320 - DNA, 465 bp, Arabidopsis thaliana
aacaaccacaacaagagatggtcatgagctcggaacaatcatcattaccatcatcatcaagatggccaaaggcagagattctagcgcttataaacctgagaagtggaatggaaccaaggtaccaagataatgtacctaaaggacttctatgggaagagatctcaacttcaatgaagagaatgggatacaacagaaacgctaagagatgtaaagagaaatgggaaaacataaacaaatactacaagaaagttaaagaaagcaacaagaaacgtcctcaagatgctaagacttgtccttactttcaccgcctcgatcttctttaccgcaacaaagtactcggtagtggcggtggttctagcacttctggtctacctcaagaccaaaaacagagtccggtcactgcgatgaaaccgccacaagaaggacttgttaatgttcaacaaactcatgggtcagcttcaactg

SEQ ID NO: 321 - DNA, 465 bp, Arabidopsis thaliana
tcgagcggccgcccgggcaggtacactttagtcctctcagacgaactgacacaagacagaatcattaccaagctatatcccgtcttcaaccttcaggctcagagaccaagtctaccctcaaaggaacatccacagttgcaccaagctccaaagattcaaaagctttctcaaagacatctggagtgttccatctcttaggtgatgatgaaaacatagcaaacaagaagcctttggctggttctcaggtctcaggtgttcctgctgcatccactgcccataaggatttggaggttccgaaacttctaactgcacacaggtcacttgataacaacccgcgacgagagatcattcaagctcctgtccggacaaagagtgttctttctgcgttctttgttaaacagaaaactccaaagctcaaagctggctatgtctcgtgaaaacaccaactctttgtacctcggccgc

SEQ ID NO: 322 - DNA, 465 bp, Arabidopsis thaliana
ccacgcgtccgctttgtcatctttcttagcgttatcccactctgagaatttcgaaatcaaatcagttctcgttgttaaagaccgtcgcagagtcgaattagcgggaatcagaaagaaagaatcaaaaacccttaagcttgtgtttaggaaccgtttattctgaaattgaagtgtgaagaaatgggaaatgatcaacataaccacagtgacagaggattcttccacaacttagcagggtttgcaggcggccaatacccgcctcacggtcatggttacggtcatcatggtcacggttatggatcttcttatccatacccgcctcctcctcctcctcatggctatccaccagttgcttatcctccacatggtggttaccctcctgctggttatcctcccgctggttatcctccagccggttatcctgctcacggttatccatctcacggttatccccgtccatctcac

SEQ ID NO: 323 - DNA, 465 bp, Arabidopsis thaliana
aagagagctttgggctggtttgggttacttgatcatccaaaccgcagggtttatgaggctaacgttttgggacctgacatgggatgttatggaaccgatctgtttctatgtctcatcggtatatttcatggctggttacgcgtttttcctcaggacatcgaaagagccttcttttgaagggttttaccaaagcaggttcgaggcgaaacagagaaagttgatgaatgagtatgagttttatctggagaggtataatgaactgaagaagctgttttgctctaagccttcggatcatgtttccaagattcttggagctatcaagagttaaaattttgattaggggaaaaattgcttagattcaatgttgttgtcacaaatggtgtctgattttacctaactagagaattctaccccaaaaaaaagtaagaaaaaaacgaatgggtacctgcccgggcggccgctcga

SEQ ID NO: 324 - DNA, 465 bp, Arabidopsis thaliana
ctttttttttttttttgacccaaagagaaaacaaaaattacttaactttttcagacttctgaaagtttacatactctactttttagttattataatatatcaaagttacaaaaaaaaaaaaattcaatattgttcagaaatgatgaactcgagttttgatttaggttttggtgatgattctgatgcttccgcatttgcattctttttcggattttcattcttttgtatttgcatcagtttcctcctcttacaagagatatatttctctatctctggtttctgctcaggtttaaaagctaaccatctttcatgtggacataaatcatcaaatgttcctagatcttgaagcaaaaaaaattgttcttcttcaaaacacttcaatttccagagaacaaaaccattatcatccaacatgattggttccgttctacgcgcatcacatataagcgtcattttagatttcat

SEQ ID NO: 325 - DNA, 465 bp, Arabidopsis thaliana
  misc_feature (1)...(465): n = A,T,C or G
tttttttttttaacagaaacaaaccattcattgcataaacaaacaacaaagtacaactttatttgtaatttacagttttgatattaagccacatgatggcgtcctcaccgcaaccgcctccatttgcaccttactgttcaccacattttcgcattctctactaggtcaccaccacaactaccagattatgctgctttcaccatgtttccgcattcaccgttacaaccaccgccacagccgctagcatttactgatttcaccatgtctccgcaaccaccgccgcagccaccaccgcaaccacccccgcaaccgctagctttagctgctttgcatctagccccataaccaccaccactagcgttagnngctttcaccatatttccacattcaccgctacaaccactaccgcagccgctagcatttgctgctgatttcaccatgtctccgcattctccactacaacta

SEQ ID NO: 326 - DNA, 465 bp, Arabidopsis thaliana
ccacgcgtccgaacaacaagaacccagaaagaggaacgaagaaactaattcaaaggatcaagttcaccgcttcattttagtcattaaacaaagatggtgatgggaggagaagcatccatggaactggaccagtgttttcagaagatgaagatggaaggaatctcgatcaaagagtggaaagatatccctgtggagcttctgatgaggatcctttcccttgttgatgatcgtaatgtcattgttgcttctggtgtttgcactggctggagagatgctatctcttttggcctcactcgtctccgtctctcttggtgcaacaacaacatgaacagcttggttctttctcttgttcccaagtttgtaaagctgcagactttaaatctaaggcaggacaaaccgcaactagaggacaatgcagtggaggccatagcaaatcactgccatgagttacaagaacttgatctc

SEQ ID NO: 327 - DNA, 465 bp, Arabidopsis thaliana
tcgcggccgcaaacttttcaataaagccgcagaattacaaaggagatgaatcacaatggaaactaaccagaccatcaaacaacaccaaggaaacatatagactagtgaacaagagacgactcagagaatattgaagaagagagtgagaagagatagactcgagagacccagtcctcaagttaaggatccaatgacactattggatcaagtgaaaagctcttaattgcatttgatagcaaatcaacttcaaaaaaagcttcagcctctggtttggcgagtgttgtatgatttgcagtttgggcatttctgagccaccacatggtactgtacctctgctttcttcccacagtcgttgcagagaatctgaaccattctgttctggtatggttctggcattggtgtagccgcaatctccatgtcaaacttctcccacacttttgacatgtcgcatacagattttgagca

SEQ ID NO: 328 - DNA, 465 bp, Arabidopsis thaliana
tccaaccgcggggcgatactcttgaaaaaaaaaatatttcttttgtaaaattaggggaagaaaaaacgtttcaaatgtaacagataaacataatatacataaaattacttaaaagggtttgcagtattgagaaatgttgatgagttttagaaggaagaagagaaaggtaacatgaatatagatcagagcttgccgcgaggaccgagcttaggcggctcctgaggacctctcttgatgggaagaacttcgccggtagaggtagcgctgacataagtaagcaaagagcctcctccaaggatcaagaacttgaggagcaatcctctctttgtgaatggggcagcgaatgtctcaaagaacttgctctgaagaggattgtaaggagaaggagcatcagagccgtatacgtcccattgacctgttgtgttacccaaatcttctaagtcaaagtagacacttttgtctcca

SEQ ID NO: 329 - DNA, 465 bp, Arabidopsis thaliana
  misc_feature (1)...(465): n = A,T,C or G
ttttttttattcaaattgcagtgattattattgatccgatttggaaaacaaatccaaaatgtttgcgagctctttcaatttcaaattaaaaaaaattgaacatttagagatgattctagtcttcagtagagatagcaggacaagtaggattacaagtcggcgacggacaatctatcttctgaaatgcactccggccataaaaccagtttccgactgctttcgcaattctcgtattggcgacttggggacctttgtcaccggaccaagaggcggcgcttcctccttggcaatgagcgtgacacgagtctaagaacaatcctctagacggtgtactgtgaaccggtgacaatgctcgcatcatctgatctctaaacccttggacggttttgagctgagcnncactacatttcttaagatcaagcttacaattcttccactcttttcccttatcaacagcagttggag

SEQ ID NO: 330 - DNA, 465 bp, Arabidopsis thaliana
cgcatgagcttatgcacatgggagctgggaagatgtctggagaggtttatcagcttgatacagagacgttagtgtgggagaggattgtgtgtgggaatgaagaggagaagccgagccaacgcgggtggtgcgcgtttacgaaagcggttaaggatggtgaggaaggtttgttggttcatggtgggaattctccgaccaatgagcggcttgatgatttggtgttttggggtttctctcatcttaatgtcaattaatgactagttgctttgtgtctttcgtgtttatgaactgtttagtgtgttgttgttttaaggagtttaagtggtgatgatatgtaactgctaagtgtctgagtttaaggagctatgtgtggtgaaactttgctacctattccaaatattttattaagtttggtgttttggtaatttaataaaaaacttgttagtctgattctcataaaaaaaa

SEQ ID NO: 331 - DNA, 465 bp, Arabidopsis thaliana
acacactcattgtgaaactctttccctctccactttagacaacgatcctttcaatgaagttatgtatgcaacgatttacgttttcaaagccaatggaaagaacctagatgatcctgtctctttgcttaggaaggctttgtccgaacttcttgtgcattactaccctctctcgggcaagctgatgagaagtgagagtaatggaaagctccagttggtttatctgggtgagggagttccatttgaagtcgctacatcaactctagacctctcctctctgaactatatcgaaaacctcgatgaccaagttgctttgcggcttgtacctgaaatcgaaatcgactacgagagcaacgtttgttatcaccctctagctttgcaggttaccaagtttgcctgtggaggattcaccattggcaccgcattgacacacgctgtgtgtgatggatacggtgtggctcagatcat

SEQ ID NO: 332 - DNA, 465 bp, Arabidopsis thaliana
tataccaaataagatgtttagaaaccaagactcgaaatacttgatcccggtgcagaaagaagcgccaccggtgacaactttaccgatgaaagcttcaacggtgaaatctccacacaactgtgaggccattctcagagacgcagatcctccgatctctctctcctctgttaatctctctgaacagctacggtctggtgttttcttgaaacccaagaaacagatcaaatattgggtggacgagagaaacagcaactgcttcatgctctttgcaaagaacctctctataacttggtctgatgacgtcaactattggacttggtttaccgaaaaagagtcaccaaagtaagatacgtttcatttaaatcccatactatgaatgttaccacaaaatgaatatctttgttacatatttgatttacaatagagttgagtatgaatcaaagtatccttgataaattcgaaaca

SEQ ID NO: 333 - DNA, 465 bp, Arabidopsis thaliana
cctttttcaacacaaaaataccgtcactctgtaccatccctccccaaagaagatcaagagaaagatagaaagaatcccaaaagattgaaaacaggttctgcaaacaaattccatatatatgtgcatcaaatcagcttgctggatagaagttctgctgctgcatcccttagatcttcgtactgataacatccatcgaagaattctgcaagcttcattagttcttgatcttccatgtcatccataaatggcttaatgggaactccattgtctggctgcaacgagtaggagaaagggttatcgtcaactagcaaaacactcccgaggtcattcttcgccaccaaagataagtctttggcatatcttccattcacttctgtgcatgaatctcgatatagccgctgtgagatcacacgattcttgtcaagtttatccaaaacctgtgaagcatattccggtaacccggct

SEQ ID NO: 334 - DNA, 465 bp, Arabidopsis thaliana
cggttgtggatgtctctttggacagcctaagaccaagtccgatcactagaagcagaagaagaccctctggttgtctgattcaagaattgcagaatggttactccaaggtgacatgggtagagcatattgaggtggatgatagatcggttcacaacatgtataaaccgttggttaataccggtttagctttcggtgcaaaacgttgggtggctacacttgaccgccaatgtgagcggctcgccagttccatggccagcaacattccggcttgtgatctttccgtgataacgagtcctgaggggagaaagagcatgctgaaactagcggagagaatggtgatgagcttctgtaccggagtcggcgcgtcaactgcgcatgcctggactacattgtcgaccacaggatccgacgacgttcgggtcatgacccgaaagagcatggatgatccgggaagacctccaggca

SEQ ID NO: 335 - DNA, 465 bp, Arabidopsis thaliana
ttccgctagttcctcctcctctcctgcgtcttcgtctctcgaagctggtgagaacaatgagctaaatgctgtttcagcttttagtgagattgttcctgatactgtcgttttcgatgactttgagaggtttccgccgactgcagctactgttagctctgctcttcttctgggtatctgtggtctacctgataccattttccgcaatgctgtggacatggctttggcggattcttcttgtgcagggcttgaaaccacagaatctcgactctcttgctttttcaataaggctattgtcaacgtaggtggcgatcttgtcaaactcgttccaggtcgagtttctactgaagtggatgcacgtcttgcttatgacacaaatggcattatccgcaaggttcatgatctgctgagactatacaatgaaatcgatgtaccacacgaccggctcctattcaaaatccctgcaac

SEQ ID NO: 336 - DNA, 465 bp, Arabidopsis thaliana
tttcagttgtagtatatggagatcaagagaaaccagcattgatcacttatccagatgtagcactaaactatatgtcttgtttccaaggattgtttctatgccctgaagcagtgtccttactgctccataatttctgcatctaccatattagtcctccaggacatgaggtttgcagaattgattgtcttgaaacaattcattattttctttgtatctcccttgctgtttgctcacgttgtgttgggttccatcgtttccacaagagtttttgcagtttggagctgctccagtttgttccaatgatccgtcaccttctgttgaagacctcgcggaccagattcttgaagtattgaacttctttagcctcgaggcagtaatgtgcatgggaatcacagctggtgcctacatcctttccttgtttgctattaaacataaagaacgagttttgggtttgattcttatatc

SEQ ID NO: 337 - DNA, 465 bp, Arabidopsis thaliana
cggccgccagacttgcttcgtttcgtcctagaacatgttgaagaaaagaatgtagagccacttcttgagggtttgcttgaagctcgtcaagagctaaggccacttctgctgaagtcccatgaccgcctcaaggatctgttattcttggacctcgctcttgattctactgtcagaacagcgattgaaagaggatatgagcaattgaatgatgctggacctgagaaaatcatgtacttcatcagcctagttcttgaaaatcttgccctctcttcagatgacaatgaagaccttatatactgcttgaagggatggcaatttgccctcgacatgtgcaagagcaaaaaagatcactgggctctgtatgcaaaatctgttcttgacagaagccgactagcactggcaagcaaagctgagaggtaccttgaaattctgcaaccatcggctgaatatcttggatcttgtctt

SEQ ID NO: 338 - DNA, 465 bp, Arabidopsis thaliana
tgttcttctcagattattatttattatctaaacaaaacaagagtcaagtcacctccacaccaaaatgttgaacaacatttacgtttccatcatctttttatggaaacttttcccacatactcctctctattaatattattacaactcaggaactatgtcggctagttcctctccttaaataacatttcctcttttttatatatgttactccgataatcatatcagagatgtgaatttacttgtatcttatatataacaagaccgaatgatttagcaagaacagcttaatgctgaattaccaaaacactttgccttgtgtttcacaactttgaagttgttcgagaatcttcggcttctaggggataagtgtactctgtccatcatgttgatctgtggagcgtccagaattgcctttggcaacgataatgcccattgcattccccatatcgcgagcggtctcatgta

SEQ ID NO: 339 - DNA, 465 bp, Arabidopsis thaliana
tgtgttctgtttttcgatgagctagactccattgctactcagagagggaacagcgcgggtgatgccggcggtgcagctgacagagtgttgaatcagcttttgacagaaatggatggaatgaatgcaaagaagacggtattcattattggagcaactaacagaccggatatcatagattcagctcttcttcgacctggaagactcgaccagcttatctacattcctctacctgatgaagattcccgtctcaatatctttaaggcctgcttgagaaaatctcccgtcgctaaagatgtagatgttactgcactcgcaaagtacactcagggattcagtggtgctgatatcaccgagatctgccagagagcttgcaagtacgccatcagagaaaacatcgaaaaggatattgagaacgagcgtagaaggagccagaatccagaggccatggaggaagatatggtggat

SEQ ID NO: 340 - DNA, 464 bp, Arabidopsis thaliana
cttttttttttttttttttttttttttttttaatggaatactctttgagaaaagagtacgaatgtattctgctctttaggtaatcaagtacatatgtgaaggaaacataagtttatatccaaaaattggaatcagccaaagccataacaaacaaattaacttaaatctaagaatctgcagactcatctgggctctgaagaatctcacgaatgaagtttatgaaagagcaaagaccacccaagaagttatggtcaatgacaccattaccatcaagaacatgagcaaaatccaccagcttgacttgtggtctagcatcatcatcatttccctttaagatggattcattctcatagaccattaaaatcgaacaagagttgaaatggtagagcgtttggttctcgaaccaggtcttgagttccagcaactgcgttaagatcccgtgggaaccgccgtaaacactcgag

SEQ ID NO: 341 - DNA, 464 bp, Arabidopsis thaliana
aagaatcccggtcacacagggactgcagtctaagagtgccattcactctttccctgctcaatgctcctccaagaggctagaagtcgctgaattctccggtctgcgtatgagtagtatcggtggggaagcatctttcttcgatgctgtagctgcacaaatcatccctaaggctgtgacaacatcaactcctgttagaggagagacagtggcgaaactgaaagttgcgattaacggttttggaaggattggtaggaactttcttaggtgttggcatggtcgtaaagactctcctctcgaagttgttgtacttaacgacagtggtggtgtcaagaatgcatcccacttgcttaagtatgactccatgcttggaaccttcaaggctgaagtgaaaattgtggacaatgaaactattagtgttgatggtaagctcatcaaagttgtctccaacagagaccctcttaagc

SEQ ID NO: 342 - DNA, 464 bp, Arabidopsis thaliana
gagaagaaatacagcatagattgtgctgagagtgtcatcaaatctctgaatttacctattgagaagatcaagaaatgcattggtgatcctgaggctgatacagagaaccaagttctgagaactgagcaagtatctcagattggccgaggaaaccggggagatgttacgatattgccaacattagtcatcaataacgctcaatatcgagggagattggagagaaccgcggttttaaaggcgatatgcgctgggtttaatgaaacatcggagcctgccatttgcttaaacacaggtctagagacaaatgagtgccttgaaaacaatggtggttgctggcaggatacaaaagcaaacatcactgcttgtcaagacacattcagaggaagactctgcgagtgtccggttgtaaaaggtgttcaatataaaggagacgggtacacttcatgtacaccttatgggcctgc

SEQ ID NO: 343 - DNA, 464 bp, Arabidopsis thaliana
gagcggccgcccgggcaggtagagaatgttgggaatcttgaggcaaagagccatcgatggagcttcgactcttaggaggacgcgattcgcattggtttctgctaggagctatgcagctggtgcaaaagagatgacagtcagagatgctctaaattctgcaattgatgaggaaatgtctgctgatcctaaagtatttgtcatgggtgaagaggttggccaatatcaaggtgcctacaagatcactaaaggccttttggagaaatatggtcctgagagagtttacgatacccctattactgaggctggatttactggaattggagttggtgctgcctatgctggcttaaagcccgttgtagaatttatgacgtttaacttctctatgcaggcaattgatcatatcatcaattccgctgcaaagtcaaattacatgtctgctggacagataaatgtacctcggccgc

SEQ ID NO: 344 - DNA, 464 bp, Arabidopsis thaliana
ttataagaatatgaatacaaaaggttacaaattatgaaattacaaacacacattcaaagcaaaatatagataatttcccccaatgctttgccaaatgcccaccactctgcgcctcatagctcgtcatggtaatcatccatataatcacgtggattcggccgtttgtaacgcctcctcctgtctccataccggtggtccctttctttccgcctgcgttcaccttcttcccgtgctatccgagcttcctcatcttctctagcttttctttctttctctgcttccgcaaataactccttctcagactccctgtgttgggcaaaatagtcatccacgatgcttcttgcatatgccgggtcatcgcagatcaatatattgtcaaagattgagccagccttcacctgccatacttcaatgcctgcatatttgatagacttcagaacgtaaagatctggatcatccccaaa

SEQ ID NO: 345 - DNA, 464 bp, Arabidopsis thaliana
ttttttttttttttttttttttttttttgttttgtattacatgctgacatttttcagataaatagaacaaaacaattgaatatgacctacttatacagccaatttaaaagggtttactcctatacaaactaaacccctctaataaagaatcgaactaacaaatactattatactacaaaaagaatggatatcaaattataagaaagcttcttacttaatcttcttcaaacctaactaactccttcctggttttgattaaaccccttgtgcttgttcacatttgttcttctttgactgacacaacgacgtcatagcttttgcagacacaacccttgtcaccagaagcttccacttggtgtcttcacccattttcttgtcttgttctccccgtttcctaaattgcctagtcccaaaaaaaagagttgaaaaggacacatgagattctattaaaatatctacaaatt

SEQ ID NO: 346 - DNA, 464 bp, Arabidopsis thaliana
cttttttttttttttttatatcaaaagacacaaactctcacatctctttatctctttattacttttacaaaatcttacttattttataggttggatggttgctcaatacagtcaaagcaaagaaacaataatgccaatccattatcactaacaaaacagttggtttaatttaagtgccatgattaaaaacagcaacgtacaaaaacaaagagtacttctcattgatcaggagctttgtttcgatctcttcataagctctatgaactctctaaatgcgttatcagagtcgtgaggtccaggggaggcttcagggtggtactggagtgacataacattcatttccgggaaagatagacccgcacagcttccatcattgagattgacatgtgttacttctacgcctccgggaagtgaagctggatcaaccgcatagttgtgattctgagcactgatctccacctgac

SEQ ID NO: 347 - DNA, 464 bp, Arabidopsis thaliana
tttaccactctccaccaccaccaaaggaaaagtacgtgtacaaatcacctcctcctcctccagtacaccactactctccaccacaccatccttacctctacaaatctcctcctcctccataccactattagatatctctatcacggagaacacgatgtacacaagaagacaaagacaagacgaaaccagtactggtgattgtaataagagaaacaaaagatgaaagagagaatccaagcagagaaagctttctcatcattttcaaagtattgtttgcgttttattgtaataaatttgaaacttgtgtgtgttgatcaatcaatggttcatgcatgcaatcaatagtcatatatctatgtttgtaaaattttaattacgtcttgttttttttctgatttttttcatgtgcaagtttgctttgtcccaattaataaaggagagttcttaataaaaaaaaaaaaaaa

SEQ ID NO: 348 - DNA, 464 bp, Arabidopsis thaliana
  misc_feature (1)...(464): n = A,T,C or G
acgagggggttgttgtagaagaaagccggacactttgagtctcccggtaaacagtcatgatttagccttcacgaagctgaaggaaatgaacagctgggcggatgataacttaataagggatgtattgttatccacagaggatgattttgaaatggccttagcttttttgaaaggaatggtttcttctggtaaggaggatgaggagccaacttcaaagattgaggggtattcatccnnnaacagaagatcggaatatagaacatttgagaaaacagttacaagttcggtgaagatggctgcaagttccacatttgaggatgctggcaagtatgatctggaaaatagtgatggaagctcgtttctggtcaatgcatctgacaatgaaaagttccctgatgatatttctgaactagatagtatcattcagcggcttcagtccattccgatagaacctgaatgggaag

SEQ ID NO: 349 - DNA, 464 bp, Arabidopsis thaliana
ccacgcgtccgaactattctgccacggtccatggatccagagaagtctaaatcggtttttcaaatagaagtttacaaaatgcctcctgatctcaacatctcctctataacacctccccagagctggcagattaaaggtaaccttaacccggattacaaatgtggccctcctcttcgtgtcagctcaagccagttccctgatacaagcggtttgccttcaaacaagagtgcatttgctagctggcaagtcgtctgcaacatcactcaaccaactcctcctaaatgctgcgtctcattctcttcttatttcaatgactcagtaatcccgtgtaagacctgcgcttgtggaggttgctctagcgacagagtggcgcgtacttgcagcacaacttctccagctcttcctcttccatatcaggctcttctaattccatttgacaaccgaaccaaacttaccaacgcttg

SEQ ID NO: 350 - DNA, 464 bp, Arabidopsis thaliana
ttttttttttttttattgtaaccttcttcctttgctaaagatacaaagacaaggagttatttcccataaactgtacatggcctttttcaaagtatacaaattccagttaaaacttccaattttaaaactcaccaaatatctttgggagagagacacagagaaagaacaaaaaccaaaaaaaaaaaaaagttactgtcaattgagtttgacttttaagacaaacatataccattactaataatagttaagagaaaaaaaacgaagaaagtccttctttctgctttctcagctttcacttggtcggtccaaggctctcatagaacaggatgtaaccatggtcagtattgctcgaatactcctgagacgatccaaagaatgtttgaacagctgattcttcaatcatctcaacattctcatcatcaaagaagagccaatggttatggcttttcacaaggcttacgtaa

SEQ ID NO: 351 - DNA, 464 bp, Arabidopsis thaliana
atccacgttacacacaacaatcattatagagacaaacaaaaataaagtaacaagaccttcaaactaaaatgaaaccacaaggaacagacaataaaaaatatacctcctaaaaaatgtcgaaaggaagaactaaatatagaatcgtttgggggataatagcgaaactacaaaaagtggttccactaggtaaattaaaacaaaatcgatacaacaacaccatctcgctctcgtcattcatttaggtactaccttccgcgggattctcagtctccattgcttcggcagaagctggttgctctggctcactcttgccctcatccgcctgctcacctcccttggcttgtggtgcctctgctttagccgccggctttggtttggtcattataggcctgcaaaacttgtccaatgcctctgccttgctttttacgtcagctgacaagagagccggtgtggcatacttggga

SEQ ID NO: 352 - DNA, 464 bp, Arabidopsis thaliana
gttcatcatgcacttgagccatatttgtctctgcttaagcttgatggtaaactcattctcatgggagttatcaacaatccattacagtttctcactcctctgcttatgcttgggaggaaagtgataacggggagcttcatagggagcatgaaggagacagaggagatgcttgagttctgtaaagaaaagggtttgagttcgattatcgaagttgtgaagatggattatgttaacactgcgtttgagagactcgagaagaacgatgtgcgttataggttcgtcgttgatgtcgaaggaagcaatctcgacgcttgatatcatgaaactcgaggccttttatacatactcgaatactcgatttaaacactcttatgtttgtttgtgagctttttcattcgtgtgtcactatttttcatgagaaagtggtaaaagatataatgatattggatttctaatcatgaatc

SEQ ID NO: 353 - DNA, 464 bp, Arabidopsis thaliana
  misc_feature (1)...(464): n = A,T,C or G
agaactcagaaagagaccaacgacactgcaaatggcggatgaatctccaaagtctatctacgacttcaccgtcaaggatatcggaggtaacgatgtgagtttggaccaatacaaaggcaaaactcttttggttgtaaacgttgcttccaaatgtggtctgacggatgcgaactacaaggaactgaatgttctgtacgagaaatacaaggagcaagggttggagatattagcattcccgtgtaatcagttcttaggacaagaaccaggaaacaatgaagagattcaacaaactgtctgcaccaggttcaaagctgaattccccatctttgacaaggtggatgtgaacggtaagaacacggcaccattatacaagtacttgaaagcagagaaaggaggnntgctcattgannctatcaaatggaacttcaccaaattcttggtttctcctgatggcaaggtcttac

SEQ ID NO: 354 - DNA, 464 bp, Arabidopsis thaliana
gctggtgccttacaatcatacaagctcgctgccaaagcaatcactaggctgcaatctttacccagcgggagtatggaaaggctttgtgatacaatggttcaagaggtttttgaactcacggggtatgacagggtgatggcttataagtttcatgaagatgatcacggtgaggttgtctccgaggttacaaaacctgggctggagccttatcttgggctgcattatcctgccaccgacatccctcaagcagcccgttttctgtttatgaagaacaaggtccggatgatagttgattgcaatgcaaaacatgctagggtgcttcaagatgaaaagctttcctttgaccttaccttgtgtggctccacccttagagcaccgcacagctgccatttgcagtacatggccaacatggattcaattgcatctctggttatggcggttgtagttaacgaggaagatggaga

SEQ ID NO: 355 - DNA, 464 bp, Arabidopsis thaliana
attcgcggccgcaaatttcagagcggatgcttggttggcatcttactcgtgggaagggagaggaaatgggggaaccccagtatgataaagaggtctctcacaatcatcttcctcgtctcacgagcagacaagatacttcaggagagttttctgctgcctcacctgaacgcctctctgtatcttctactatcgctgggggaaagcgccttccctattcatcagatgtcaatcaatcaccaaatagaaggattgtggatcctgttggactcgggaatgtagcttggaaggagagagttgatggctggaaaatgaagcaagagaagaatactggtcctgtcagcacgcaggctgcttctgaaagaggtggagtagatattgatgccagcacagatatcctagcagatgaggctctgctgaatgacgaagcgaggcagcctctgtcaaggaaagtttcaattccttca

SEQ ID NO: 356 - DNA, 464 bp, Arabidopsis thaliana
catactcaagatccatgaagttatggcaaccaaatctaagatctatctcgtaatggaactcgcttccggtggtgaacttttctcaaaagtcctccgtcgtggacgtcttcctgaatcaacggcgcgtcgttactttcaacaactcgcctccgctcttcgtttctctcaccaagacggtgtcgctcaccgtgatgtgaaacctcagaatctactcttagatgagcaaggtaacctcaaggtctctgactttggtttatcagctttaccggagcatctacaaaacggattgcttcacacggcgtgtggtactccggcttatacagctccggaggttatttcacggaggggatacgacggagcaaaagctgatgcgtggtcttgtggtgtgattttgtttgttttattggttggcgatgttccatttgatgattcgaatatcgctgcgatgtatcggaagattcatc

SEQ ID NO: 357 - DNA, 464 bp, Arabidopsis thaliana
attcgcggccgcttagatttgttacatcactttctctaaaaagacttgtcattctcaaacataagtttcccaaagtgagtttcttatatgaaaaagtgagaatgggaagtaaccaagaaggtgttattggaaaataaaccaaaaccaaaaaattatgataaaaaagattcgttgtataatggtaaaaaaaggagtaaaatgagaaaagaagaaagaggagggggacaaagggagaaagggaccacatgggagaatcggggagctttgcatgaagatccgcgtgtgcttcctctttgggatgttctcccacgtgtttctgtttcccttttctctttctttattactctcctttcttcttcttatcatacaacatcaaaatgtcaaagactctacttccttgtatagatttgtcctcaatctgagcaaacccacacagagcatacccttgaactatgtgtggcagc

SEQ ID NO: 358 - DNA, 464 bp, Arabidopsis thaliana
tcgaaagatagtcaggaccatgtaagttctgaagatatgacacgacgggccaactcctatcattcttactcccaaagccctccttacgattatcagtatgaagagcgccgttatgggaaaatacccttgggatttaccggcaagtctgcttcagtgaaaggtcttcatgcaaaagcctctagttttgtatacagccccggacgttttagtgatcatatgtttgaagaccaattctcaaatgaggactcagctccaagggcttcagattattctgtttcgagtgcaggagatccgttcaggtctgatatacagtcaccaaattttcagcaggaagctgaatttcgtagtccccagtttcagcattcaaatgcccctccaagtgaaaacttatttccaggcaggcaacatcagagaactacatcttctgggagtgtcagatcagttgacagtaatttcatgtctat

SEQ ID NO: 359 - DNA, 463 bp, Arabidopsis thaliana
  misc_feature (1)...(463): n = A,T,C or G
taactaactccaaaataaatatgaaatacattataagtaaaatagaaagattgatttggtgcaaaactctatacactctttaatcccggcatcaaattctaatacagtatagagagaataaacaaaataatagtattaaatgaccacaaaacattagagtacagtaaaaacaaattaattattcttgacgtaatgattacgggtagaagaagacatcgccggcgagctacaccggaccacgaccccttcactatgacttcccgatccttcgtccacaataatcgacggtctataattggaatggctaggccattgtggaggtggcggtgcggccatggttccatagatgccggtggttgtggtggtactgctggtggtggctcctccggtagtcttgcccgnnnagtagtccgattgtggtacccataaaccaccgacgactacgaaatgttgcgtttgagag

SEQ ID NO: 360 - DNA, 463 bp, Arabidopsis thaliana
aaaatgatgtttgtactttgattaataattgacagaagaaattgatggatacaaatttaaagaattcggaatctgctactgtacaatgtgattattcattcacatttaaattgaaaaagattttacatgctaccaacgtaggatttatttacagaatcattttttcaccttctcttgccatcacaaagaatcaaagaacccttgttcttcctccacacattgaatcccccaaacctcctcttccagcgagctttctcttgttcaagacttgagatcaacatatacctacagactagagattccggttttcgatagagaacttgttttgactacgtccttaggaggaactgtccgcgagaggaataagttaccccttgaatctttcctgctgtaacgctccatatcttgattcatcactatgctgcactgtctccaactctcacacttcaactctaccccaaag

SEQ ID NO: 361 - DNA, 463 bp, Arabidopsis thaliana
ggtttttatttttaagtgtttaggatagactacaattgaaagccttttttcacaacaagcaagagaagataaaaatgaaaagagtcatattccgattacacttttagttattgaaaaataacaacaaggtaataacaagaatcagatttgtgaatcttcaagcaacaacaagaaaaaaaaaaaaaaaaagtcgagacatatgaggctttttgtcacaactccaagaagaaagattcaaactgaactcattcatcaccggcaaatctgacatgttttcctgtcggtgtaggaaagcctttcaaacgcaacactcctggagattgatctttggcctccacaatctcttcatcttcactgtcatacacaaatctagtgtgtttccctgcaaagtcagtctctacgctcatcttcctaattccctcacacaacccatccacaatccctccctcttcttcctcctctt

SEQ ID NO: 362 - DNA, 463 bp, Arabidopsis thaliana
cgaaaaaaatggcaaccatttcgaatctcgctaatcttccccgcgccacctgcgtcgactccaaatcttcttcctcttcctccgtcttacctagatccttcgtcaatttccgcgctttgaatgcaaagctttcctcttctcagctttctcttcgttataaccaacgatcaataccttccctctctgtgaggtgttcagtgtctggtggaaatggaactgctggaaagagaacgactcttcatgatctatatgagaaggaaggtcagagtccttggtatgataatctttgccgtccagtcacagatcttctcccgttgattgctcgtggtgttagaggtgttactagcaaccctgcgatcttccaaaaagccatttccacttcaaatgcttataatgatcaattcaggacacttgtggaatcgggaaaggacattgaaagtgcgtattgggaacttgtggtgaa

SEQ ID NO: 363 - DNA, 463 bp, Arabidopsis thaliana
tgatgatgaagaaccacaaagccaacaacagcaacagcagcaaccaaaagttgcaagaagaggccgtccgccaaagaaacatcctgaaccatcttctattgaccgcactgcttctgaaatttcagctgatgctctcattcctggagatagctctaacaagttttctggtgcttacaatttaagaaaggctcctccttcatacaaattccgccaagcagaatcatcagttagaatcaatcataacagtgaaacccagagtggttggtcggtagactgggagagcgaatttccatcttcggttgtgaaggcggttaacaagtatgggatgaaacatttcaatgtcgatgataacagacgcgatacctacaaccacctctcgacttctacccaagaaccatcggttttgacaacgcttgaagacgagttaaaacagttgattccagttgggctgaacatggagtac

SEQ ID NO: 364 - DNA, 463 bp, Arabidopsis thaliana
gcaattctcgaacttcgccggagaatgatggaaacagctctgctccggtactgcgtcaacttttccggtcacaagaaaatctctgctcatcaaagaagtaatagtgagattccgaaaacgagtccgggaggatgcgaagacgagtggtgtgctagggttttgagtagaagatcggtaatggcgtcagggttggtctcctcgacgacggctttagcatttccaagggaaggattggctgtcgttaaacaaggtcttctcgctgggagagttcctggtctgtccgaacctgatgaagaaggttggagaacataccgtagaccagacgagaagtcaggagggcatggtgttggttggagtcctattatcccttacgccttttcggttcctcaagattggaatgaggtacctgtatcgatcgctgatcttggtggcaccgagattgacttgagatttgctagtccta

SEQ ID NO: 365 - DNA, 463 bp, Arabidopsis thaliana
attcgcggccgcatattcctcctttcttttcttcgcccaaagacaaaaatttctcaaacttggtgttacaccattataggctacagcagaaaacaacattcaacccaaaaccaaaaacagaaaaataaatctgaacttttctttcacatcttcgaaaactactttaaaatcttgttctaattatcacgtctcggttgccttttgcgtggtgccgcggtttcttccttcttctccgcctcatccccactctttgaactctccgctacttctggtttcttcttttccacaggtgccgccgcctttttgccaccaaagataagcttgaggaagagcgagaagaatacaaccacaatggcgacgaggacaccaatggttaagtttggttgttgctcggctttctcaatcagttccgtgatcttagacttgtaggcacttaggaaagataaatctgcaaccttgttca

SEQ ID NO: 366 - DNA, 463 bp, Arabidopsis thaliana
  misc_feature (1)...(463): n = A,T,C or G
cttgatatcgaattcgcggccgcaagcctcttcgaacgcctcgttgaaccgtctcagagactcctccgcctccgtccccgccgttgaatcannggggagcgacgctatcacatccccccaggccattttttcgtatttctcgaggtattgattcactttaacctcgtgattcgctacccaatcgtctccgagtacgagtctgagattcgatgtacggaccttggtcacaacgtaatggaggttgttcgctaggaagagatacgatagagccgagtcgttgtagagccgagatttggcgtcgattttacagagcaagacgagaatcaaccacgcgagnnncgccgccatcggagaacgatcaccggatcctggattctcttcgccgctgctactgaagtaatcctccggtaaaggtaacgatgactccttgagaatggtggcgagagaatcgctgtagtctgcg

SEQ ID NO: 367 - DNA, 463 bp, Arabidopsis thaliana
tttttttttttttttttaagtggtaaccaatgaaaacccaacgaactacaagaagaaccttgtgataatttagtaacaccaaacaaaaagcaaaaagtgcaaatgattcaaactgattctctgtagcatttaacttaataagatatatagaaacatcgaagagacagtagacagcttatggttaaacttgtcttctcagacttgagctgtgccttcggtaaacttggggtcctcacatctgtaccgtccatcaggtccaattccaaatccttttggatcagcaaacacattctctagcaactgactgcgaccgggctgtggactagcgtctgcaaactcaaccgcttcctccaccaactcgtctatctttttctctattgactttagctctgcttcctttgcaagcttgttctctatcaaatacttcttcaatgctgcgattgggtctctagccgcgtatttg

SEQ ID NO: 368 - DNA, 463 bp, Arabidopsis thaliana
catccataaaacacaaaccttcttttaggtttcaaaaatacacaaatgaataaacgtactaaattaaatgaattaaaattcccaaccatctttcttgtttcttcattcattcaaagatcggacacataatcttatgcttgggttttggacctgtagagcaccttcttcttcttaaaggtttggttgtcaatcgtgatcacgacctttcccgcctcacttgccttgaaagaatcggttatcaccggttcatcagttaaaccgaccttccggttcttagagacaatcacggtgtagcttgcctcattgcttggctcaaattgagctccgtagctcacgtccgcacccaaaaccctaagctcccatgagagcgtggaaccctctgtagcaggcaaatcaatggtatatttagatgtcgatttaactacggcctcggtgactccatcttcaacggtgaatggactat

SEQ ID NO: 369 - DNA, 463 bp, Arabidopsis thaliana
gcgaagtaagtagccacttttctcatagctccggcttgagacacagctaagcatccgatttgcttcacaagagcttccgctagagtcaaattgttctgctggattgcttctgcacaagccataagcgcgtggactaaacgaacaccgttctcttgcgagtcaaccaggataacagaacgagttgactcagccgccgccgtcgttgtcgtggtggttgtcgtcaccgtcgttcctatgactccaccaatctgcgtacccgtcgaagtcgatgtaaccatagaatcaggactcgagcatgatttcaaacgcttgttctgattattcgacgaagacgaagaatcaatcgccggaaactgataaatcgcgtttccgggaatgactttaaggtcataatccgaagctggaaaaccacaaatctccggcgaaggaagaaccggatctaaaccgttagaactcgccggaa

SEQ ID NO: 370 - DNA, 463 bp, Arabidopsis thaliana
  misc_feature (1)...(463): n = A,T,C or G
tcttttgtacaaactcaaaggagaaagccaacaatattcaaaaaaaagaaacgaagaaaacaaaaacctctctcgctgcaaagttttatattcacagaaggaaaatatgattgnnngaaagntagcaaagcgaatactcacaatccagcaaacgagagagtatctcattgcaactcggtctttgttccggttctgtccaacaatctgcaataagctttcccagtggtccttcaggaatctcaagccgagctccctcgtaagcaatagcataaacaacccgttcaggcggtactccttcccaaggtctggttaaagtgcatagctcccacattattacacctaaactgaagatatcacacttttctgagaagggctcattgcggataagttcaggagccatccactctggagttcctgcagagactgtgtctctcattgttgtccctgtcattattctcgacag

SEQ ID NO: 371 - DNA, 463 bp, Arabidopsis thaliana
  misc_feature (1)...(463): n = A,T,C or G
tttttttttttttttttagatcccaaaaagtttcatgaatcgataatataatctacaaagcaacaaagattctcgctctttaactcaaacataagctcgctaccctaaagttttctcaatagcagtctcaaggaacacaacaacctaagaccacaacagatcaaaaagaaatttcacaatgaagagattccatacatcggcatcgatctcagcagctctctgtctgttacttctagctttgtttagcagcaagtataatgtagagtgtcgtcagatggcgccnnttccatggatttagcttctagtaaaggtgtgagagatttgaagataagccaggagatgaaaggagagtctctaagaggtgaaaaagatagcttccgaagaatcccaaggactggctccagcccttcaaattctcattttatttgaatgccgattctttccagtcatctcaccagaaagg

SEQ ID NO: 372 - DNA, 463 bp, Arabidopsis thaliana
cccaaatcggatgaatcgaaacctaatcccggatttctcacacggatcgcgacgtcggcttctgagcagcgaaagacgttatctactggaaccgttatactaatctctgcagtagctgtgcttttgcttaacccgcttcttgcaccacctgctttcgctagctttcaaactgcagctaaatccggttggctaacaagtgcgtggaccggtttccttgctggttgcttgcacacgctctcaggacctgatcacctcgctgctttagctccgctttcgatcggacgcagcaaaatggaaagtgctgctgttggagctctctggggatgtgggcatgatgctggtcaagtcatctttggtttactgtttctgctacttaaagaccggcttcacattgaagtattacaaacttggggtacaagaattgtgggattgactcttgttattatcggtgctatgggaatca

SEQ ID NO: 373 - DNA, 463 bp, Arabidopsis thaliana
caacgcctgcgcctctccgtcaccgttccccgccgtcacgaagcttcatgtagactccgtcacgtttgtaccgtccgtcaagtcaccggcctcctccaatccattattcctcggcggcgccggtgtccgaggccttgatatccaaggtaaattcgtgatcttcaccgtcattggagtatacctagagggtaacgccgttccttctctatctgtcaagtggaagggaaaaactacggaggagctaacagaatctatcccgttcttccgtgaaatagtcaccggtgcgtttgagaagtttatcaaggtgacaatgaaactgccgttaacgggacaacaatattcggagaaagtgacggagaattgtgtggctatatggaaacaattagggctttatacggactgtgaagctaaagctgtggagaagttcttggagatcttcaaggaagaaacattccctcccggt

SEQ ID NO: 374 - DNA, 463 bp, Arabidopsis thaliana
cttttttttttttttttttttttttttttttttgatatacctaaaagggttcatcttcaatagacgatttggggtccttacacaccattttaaaaccaaagacaacatcgaacacaagaccgaaacaccgatagaatgaagttgtttataggttcataacttcacaacacaatgtaaaaacataatcaagtaccagtaccatcactcaaaaataacagaataagagaatagatctttcaaggggatgatgataataaactttggtttttactctttagttggcacggcttctgaaaacatcgagatccatctctgttggatcagttgcctgtagctctacttgaatcccatctagttccctcttgaacctgtccttagagcttgcgtagatcatcttgcttctcaccttagcaatatccgggcaccacgcgatgaagaagatcttgctcttctggcaattctc

SEQ ID NO: 375 - DNA, 463 bp, Arabidopsis thaliana
atcgccgccatggacgccattgattccgtcgttgatcctctcagagacttcgctaaggatagtattcgtctcgtcaagcgttgccacaagccagatcgcaaagaattcacgaaagttgcagttcgtaccgcgattgggtttgtggtaatgggattcgttggcttctttgtgaagctaatcttcattccgatcaacaacatcatcgtcggtgccacttagaaagcaaaggatacacaagtcagttctatgttttgagaaaggaagatttagaggttatcgtgttttaagtgaaaggcacaagtcagttctgtgttttgtgtaatcggatcccatttgtttcaatgtttttttggttcttcttttttgttcacaactgaaaaatcggacgtgttttgaatgtagagcaaactaatttaaaaaaaaaaaaaaaaaaaaaaaaaaaaaaaaaaaaaaaaaaaaaaaa

SEQ ID NO: 376 - DNA, 463 bp, Arabidopsis thaliana
tttttttttttttttttagcaagtaaactatcctcttgacaaatttaaagaaaaataatcctcaaaagtaaagaacagcagaatccaaagtcagagagagggagagagagatagagagagatgggaatgttttacagcataaatgttttcatatgatgataagactccattgttaggcttagcaattcacctgcaagatggcattaatagggtccgccgtaaaacttacgggacataaagaagttgaaatcgctgtgggagaagccgcgttttctcagccacgagtcagcagattcttcattcatctctctgttctgataatctgatgtcccaggcatcatccacaggttaccaaaggccttgtaagtcattgctccaaatggaggaagtagaacttctggtgtacttgactctccttgttcattccccttatcatccttaccaattgtttctggaaagtttg

SEQ ID NO: 377 - DNA, 463 bp, Arabidopsis thaliana
tctagagcggccgcccttttttttttttttttttttcaggatcttaacttaatacatattgtatgattcttctacatgtgaaaactcatctcaccaaatctgcaactaacaaaaaaacaaacagaagaagaataaagaaggacacaagaatttacattacaaacaacaaatacaacattctaaaacacacacaccaaacttttctttttctactacttcttgacttcttcttcaacaacaacatcagctttcgttacaaggatatccgctttttcgtcagcacattcctcgggaactatcgccattgactgcctattaccgcatattgtccaaaggtataacgcgaacatggctcccaatgttccacaaaccgcccccaaaaccaatgcaccaaggattctccatatacattttcctttccccttaacttccaccgtcttctccccttccttaacagtcttgg

SEQ ID NO: 378 - DNA, 463 bp, Arabidopsis thaliana
aaaaaacaaatcctaagcagtcctaaccgatccccgaagctaaagattcttcaccttcccaaataaagcaaaacctagatccgacattgaaggaaaaaccttttagatccatctctgaaaaaaaccaaccatgaagagagatcatcatcatcatcatcatcaagataagaagactatgatgatgaatgaagaagacgacggtaacggcatggatgagcttctagctgttcttggttataaggttaggtcatccgaaatggctgatgttgctcagaaactcgagcagcttgaagttatgatgtctaatgttcaagaagacgatctttctcaactcgctactgagactgttcactataatccggcggagctttacacgtggcttgattctatgctcaccgaccttaatcctccgtcgtctaacgccgagtacgatcttaaagctattcccggtgacgcgattctc

SEQ ID NO: 379 - DNA, 463 bp, Arabidopsis thaliana
  misc_feature (1)...(463): n = A,T,C or G
caacccggtaaatttctaaatattggatttatcatttatgtagcaatagggtttttatacgaagaatataatatatcaacaattattatggacttaaattgaataattataacatgaacacacaatgttagactatatttcattttttactatggaatttcttataataatcgatacgagttttctgtaaaaatcttgaatagatcatgatatagttgttatatgtcaagtataggctttgttggccattggggaagtaacaaatgagatctcannaggaagcagtgactttttcccaataagaccaaatgattacggaaggtttcttgtgctttcgcttggaaccggaaatcataaagccgaagagaaattcaatgcaaaagnngtagctggttggggactattgaattggttaacacacgacaactctacacctatcattgatgctttctcgcaagctagc

SEQ ID NO: 380 - DNA, 463 bp, Arabidopsis thaliana
tggttgaatggagatatcagagagagttcgagctcgattagctgttctctcaggtcatttatcggaaggaaaacaggattctccagcgatcgagcgatggtgcacgtcggcggatacgagtgtcgcaccgcttggatctttgaagggaacactgacgatcgtcgacgaacgcaccggaaaaaattataaagttccggtctcagatgatggtaccgttaaagccgttgatttcaaaaagatagtgacggggaaggaagacaaggggcttaagttatacgatccaggttacttgaacacggctcctgttcgatcttcgatttcttacatcgatggagatgaagggatccttcgttaccgtggctacccaattgaggaaatggctgagaacagtacttttctggaggtggcttatcttctcatgtatgggaatctgccctctgaaagtcagctatctgattgggag

SEQ ID NO: 381 - DNA, 463 bp, Arabidopsis thaliana
tgctgaaagactgcgacagtttccgaaaaggagattccggcgacggcgtaaaaagcgacgatcctgcacatcacataatagatgtcgaagccttgtacgtaaaacctgtcccgtacgtcttaaactttaacaatcttcaatacgatgtcacacttcgccggcggtttggcttctcacggcaaaacggagtaaagactctactcgatgatgtttccggagaggcttctgacggcgatatcctcgccgttctcggtgcaagtggagcaggaaaatcaacgttgatcgatgcactagcggggagagttgctgagggaagcttgagaggctctgtaactctaaacggagagaaagttttgcaatctcgattgttgaaagttatatcggcgtatgttatgcaagacgatcttctttttccgatgctcaccgttaaagaaaccctaatgttcgcttccgagtttcgtct

SEQ ID NO: 382 - DNA, 463 bp, Arabidopsis thaliana
atgttacataataaaaggaagacaagacacattaacttcacccgaaattaatatggttcaaggggccgggagataaaatatttagacaaacaaaacagaaactttataagctataccaaaaaatattctaggatctggtcttttagcatctctggtttgtttttgaagactacacaatctcacttcttagagtaggcaagatatggatcctgtgccattgttagaacatccggcctatcttcttggttatatgttagacaccgtcgaatcaaatccttcgcttcatttgagatggcaggtcttgttactgggaactcaacctttttggctttaatgattgtgtcttctcttagtatccgttcttggctttggtcatgtccaaaaggtcgctttccaaacagcatttggtaaaacagaacaccaactgaccatacatcaacctttgatgagatcataggagttt

SEQ ID NO: 383 - DNA, 463 bp, Arabidopsis thaliana
gaggtagagatatggaattgctctttctcctctgttcaatcatctacacttcaatcacttccatcttcttctctcttctcctcccgtttcgcttccttctccaccgtctccttccttcacgcgccgccgtcgatcctaatgtctctttctacgaaggcacagtctggcacgaccgtctccgtcctgtccgccactctttccgttattccgttcgttacgcactctttgacctcgacaaagctattaacacaccgccggatcatttctccgccgacgaagctcgccgtgtttctcgtaccaccgggccaatatttctattgacaataccaccaagcgttggatatgaacaaaacccattgagtttatactattgctatgacttggaagggtcaagtaagcgcttaagtaaatgcattgctcaggttacaaatacgccgtggggggaacgagtgacatttgtatt

SEQ ID NO: 384 - DNA, 462 bp, Arabidopsis thaliana
gatacagatcccatccaacataacatcatcatctcacagttcgcgttttctaaccacaacacaccccacgcgtgtggcttactcgcgctacataataaaaataacaaacacaaacaaaaagagtaaagagggggtttccaaaccccagtcaatacccgaaccaccaactcctccaccgtgatcggacccgaacccttttacgtcgttgtcccatcacggtgacaaaggagttggatctcgcccactcgcgcggttcgttcttgactcgacaccccctccctcccatagtacaagaccaaaaaaacaagttatataaaaattcacaattcattaagaaaaagaaacacacgcacgcgccagtcttgatcaagatcagctttcgcattgtaaagcggcacgaatcttctgaacggtgcatgatattaggttgttgacagtctccaccgactcaaccgtgagttt

SEQ ID NO: 385 - DNA, 462 bp, Arabidopsis thaliana
ggactggtggataccaaaaaatgtgacctacctaatggcccaataaacataagtgattttctgacatagcccattaggcagtttatgttgagtgattttgatggttgtgtgaaccgtataaataaattatgtcaacattatgagaaaacaaaccataatatattggattgaagggtttgcttattcagtagctttgctggcgctataagcattgacgagctgagcctggacttcattggacacagcagaatgttctttgtattccatcgtgaattctccttttccttgtgtcatggaccggagagaagtggagtagccaaacatgttgttcaaaggcacattagcagtgattactgaatcatcaccctcttgatcgtttccaacgattatacctttcctcttgttgatgtcaccagcaacagtgccctgaaactctgttggtactttcaactcgaccagcat

SEQ ID NO: 386 - DNA, 462 bp, Arabidopsis thaliana
ttggagtttacaatgtcatatcattgttcaacagataacagttacgatgataacacgacaaagcaaaaggataagactaagaaagccgagaaagagaggagagcaaaacaaatggagacttttcttttaagcggaagcaagaagcaaaccggttgatgatttttcttgattaagcaacaggaggacgaaggacatgatcctgagaagtatcgactgaagcaggaggcatgaactgccacatggcaactcctgggtaactgatgattggcaccatcttgtttccaggagcttggccttgcgctgaagcaaaagcagtaggcatcataggtggggctgggaaaaaacttggttgaggagcattcatggctttcagctgctgctccagcttttctttctctgtcttcagcctctgtttctcatctcgcagctcgtttttctcagtctttaactctttgattttgt

SEQ ID NO: 387 - DNA, 462 bp, Arabidopsis thaliana
tcatctctctcgaatctctctctataatccgatctgagaaatttcgccggagctaggttttgttgtttaccgatcaatcctttaatcaatggaaatggctgttttccgtcgcgaagggaggcgtctcctcccttcaatcgccgctcgcccaatcgctgctatccgatctcctctctcttctgaccaggaggaaggacttcttggagttcgatctatctcaactcaagtggtgcgtaaccgcatgaagagtgttaagaacatccaaaagatcacaaaggcaatgaagatggttgctgcttccaagcttagagcagttcaaggccgagctgagaactcccgtggactttggcagccatttactgcacttctaggagataatcccagcattgatgtaaagaagagtgtggtggtcactctctcttctgacaagggtctctgtggtggaatcaactccactgtcgt

SEQ ID NO: 388 - DNA, 462 bp, Arabidopsis thaliana
  misc_feature (1)...(462): n = A,T,C or G
ccacgcgtccgacggtgtttggggtatcgacagagtcaatgcagttatcatacgactcgagagggaactgtgttcctgtgatactgttgctattgcagagccggctttatgatcaaggaggcttgcaggcagaaggagtattcagaatcactggagagaacagcgaggaagagtttgttagggagcagcttaataaagggatcatacctgatgggattgatgtccattgtttagccggtcttattaaggcttggttcnnnnagctgccgagaggggtactggatcctctgccatcggagcaagtgatgcagtgtgagtcagatgaggattttgtcaaagttgtgagacttttacctcaaacagaagcttctcttctcaatnnngccatcaatctcatggctgatgttattcagtttgagcatgttaataagatgaactctcgtaaccttgctttagtctttg

SEQ ID NO: 389 - DNA, 462 bp, Arabidopsis thaliana
aactttattcgtccagatctaattgttggatcctgcttacagacccctgaagatgttgacaagcttcgtaaaattggagttaaaaccatattttgcttgcaacaagatccagacctggaatattttggagtagacataagcagcatccaagcctatgctaagaaatatagtgatattcagcatattcgctgtgaaattagagactttgatgcatttgatttgagaatgcgtcttccagccgtggttggtactctttacaaagctgttaagcgaaatggaggagttacatatgtgcactgcactgctggaatgggaagggctcctgctgttgcgttgacatacatgttctgggtgcaaggctataagcttatggaagctcataaattacttatgagcaaaaggtcgtgctttccgaagctggatgctatcagaaatgcaacaattgatattcttacaggactc

SEQ ID NO: 390 - DNA, 462 bp, Arabidopsis thaliana
catatattttcttttctttttcccaaagagaaaccctttttttttttacaagcaaaagccacacaatcataaaaactttaatttcttcggaaataaacaaagaaaataattaaaaagttacgaaaccatctcaaccttaatcttgcgacacgtgtccgtaatacaataacataatgaacggctgagatccaccgagacaatcgaaattttctcagggtaaagatagaaatcggtcaacggctccgattcatattttctgaagcttcgccgcaataaccaacggattagctttcgcgatctcttcacgtcccgccgatttgaaatcaaacgtacaaccatgaacctccggatacctatgactcccacaaaaagtcgtcccacaccgacacataaacccggttaacccgacccgtttcctacatacggtgcatcgattcggccgttgcggcggagacggttgct

SEQ ID NO: 391 - DNA, 462 bp, Arabidopsis thaliana
  misc_feature (1)...(462): n = A,T,C or G
ctcctctaagctcctcccatggaagcagaagaaggtcatcagcgtgaccgcctctgcgactattgcgactcctccgtggctcttgtctactgcaaagctgactccgccaagctctgcctcgcctgcgacaagcaagtccacgtcgccaaccaactcttcgccaaacacttcaggtcacttctctgcgactcctgcaacgaatctccctcttcccttttctgcgagactgaaaggtctgttctttgccagaactgcgactggcaacaccacaccgcctcttcctcccttcatagccgcagaccctttgaaggatttaccggctgtccctccgtgcctgagttgctggccatcgttggcctcgatgacctcactctcgattccggattgctttgggagtcacctgagatcnttagcctcaacgaccttattgtttcgggcgggtcgggtactcataacttccgg

SEQ ID NO: 392 - DNA, 462 bp, Arabidopsis thaliana
gtagctacactggaacatataaaccgaacaaatgccaaaccggctgtggtcaacctacacaaaggtggtaccatgtgccgagagcttggttaaagccgagccaaaatctgttggtcatattcgaggagcttggtggaaacccatcaactgtctctttggtcaaaagatcagtatcaggagtttgtgctgaagtttctgaataccacccgaatatcaagaactggcaaatcgaaagctacggaaagggacagacatttcatagacccaaggttcatttgaaatgtagtccaggtcaagcaattgcatccatcaaatttgcaagctttggaactcctttaggaacctgcgggagttaccaacaaggagagtgtcacgcagctacctcatacgctatcttagagaggaagtgtgtagggaaagcgagatgcgcagtgacgatatccaacagcaatttcgggaaag

SEQ ID NO: 393 - DNA, 462 bp, Arabidopsis thaliana
ccacgcgtccgtcttcatcatcatcatctgttccaatggaatttgttagtaagaagtttcaaaacgttgttcatcatcaacagcttcctccttctacattgcctccaattcttcctctccctccacaatacacaaaaccacaacaacttcccattaaaccagtagaccacgtcgaaccaccaatgccaccttcaagaaacttccgtggcccgatcccagcggttagcgctggggacatctctcaccagatgctcaaccttttgtcaaaatgcaacgaagtagtggctaacgtcacgggcttattgggctacgtcccttatcatcccttgtaacaaaacgaagcccgttgagagaaaatgtgagtgtttgtttggtttttggtgataatattgtatgttaggtattagtttggttcgttaactttaaatcatgtattacaatttataatgatgaatctctctc

SEQ ID NO: 394 - DNA, 462 bp, Arabidopsis thaliana
cacgatcctctttctcggagttgaggtatacataatggctataacagggcttgggtttgtcgtctctgtattggaagaaagatacggttttgatgcgattaaggaaggaaccgctctgatgaaagggaggaggataacagggttggccttggcgggtgtatttgtgtttctatcgagtttcattggtcatgggatggagaagttggcgaaggagctagatatggacttgagctcagggtcgtggtggaggtcggtggttgtggccggtgggtgggacgggtggaagctggtttgtatgtatggggctgaggttgtgctgagttatgttgtaatcactgttttttactgtgagtgtaggaaacgccatggtaacagttatgcaattgttgctgatgaggaaggtcttgctatttaaaattagttccaacacttttttgttgttgataattctcttgtgaatct

SEQ ID NO: 395 - DNA, 462 bp, Arabidopsis thaliana
tgtgaagtaaaaaagtctatagatattctttaataactggagtactttacattggagctacacttaatcactagcagtaaataacatgaacaaacaaataaaagttacaagattacatatgtggaagaagtacatgaataaaagaacaggcaaagatactaagtagccattcggatggttattgggtaataccaggcattcacggggctgctgcacttctaaccgtatgttggattgagtgctatggcttcttggtagatcatctcttttatctgttcctcatccagaggctgttgttcgaactcaaaagagaatggcttttgacagattggctcatcattcgggtcgtgcaatttagcaaggtactggtgattcagagcttgttcaacagtgattcttctgttggggtcaaacgtcaacattctgtcaacaagatcaatggccattgggttaacatgagag

SEQ ID NO: 396 - DNA, 462 bp, Arabidopsis thaliana
ccacgcgtccgcaaagttagaaccacaatcaaatccttttacacaaagaatcttaaatttaatggcgaaccgaggaggatgcgtgacggtggcggcggaagagatggatgagctaaggaggaggaacatagagctctcgagagaagtggcggagatgaagacagaaatgattaagttgtggcagcgaacggttgtggcggaggaggcggaagagcaactctgctcgcagctggcggagctggaggtcgagtctttagaacaggcacgtgactatcacgatcgcatgctcttcctcatggatcaaatctctcgtctctcttcttcttctgtcgtctcttcctcgtagaataagatatttctcataagttatgtatagttgtgtatgtgacaatcaatatacatgtatatagatcgatggtaatatgttatgttttcaacataaaaaaaaaaaaaaaaaaaaag

SEQ ID NO: 397 - DNA, 462 bp, Arabidopsis thaliana
ggatccttgtagaactccggcagattgtggagcttgtaaacttcattaacagcatcaatttgcttacttatctcggatagtcctgaagtagtgatttccaaagaaaggaaagagcgagtatggtcatcattcacaaagacttcccacttattgaaatctatcaagtatctcttctgcaactgaagcttttgccgaagcatagaaatcaccgagttaatctgatgaacacgtagtggaacgtttcttcctaagcttatgtggaactctctccccaaggcacgctcaaacttctgatcatccttgcatagaatgctgagtggcacatcagcctctaccaaatgaagatgaggaacaactgatgcaaccttctttaaaaaacatacaatctccttctttggcagtggaggtatacaaacaggtacgtaaacgtgcaaagcgtaatttccatcgacatgaggaaag

SEQ ID NO: 398 - DNA, 462 bp, Arabidopsis thaliana
tttttttttttttttttttccaattgtgtaaatatcatttcgtatgtacaaagatacatctgaatattagaactgaggattgttcaatatttactcaactccatatctctctgtctgaaatatagaatccatagttagtcttgtctgaacttaatctccacttctcaagactacaatctgacaaattgtaataacatccatgaatcttgacttcacctctctttactctatctcttatccatgaataagttatcaaattcatcacagaatcctttatagattccttctcacagtttctgcattgttcatcaaaggataaatgtgatgaagctaattgtgttcttaacttagcggctttcccattcataacccacctttctactagagtgttgcccttggtggttttgatgactcataagtgctgcaattcctccacaattgctatgacccataactataatg

SEQ ID NO: 399 - DNA, 462 bp, Arabidopsis thaliana
  misc_feature (1)...(462): n = A,T,C or G
tttttttttgatggggaaatatcatacactcacaaaacgtatggttacaatggaacattacatgactttcttcacaacccccagaagaaaaaaattctgaaaagggaaccaataagaaaagaatcaaaaacacaatttttgtataactctgtttctatcattgcattactgcaagctctataccctgagtccatcataccaactccatcagaagcgggtcgcnctcagccatttgctgaaccaatttgatgaaatcttgttcgcttgatatgctccacgggtgaaccgcanngctttagcagaatacagactcgaagaagtgttaaacgaagctgatttcctcttatataccattgaaccgagaaccgggtcaaaattctgaggcgaatccatagacaagaagaacattggcacagccactttgtaatgcaagtccatatcgcccacgagatcaacaagatc

SEQ ID NO: 400 - DNA, 462 bp, Arabidopsis thaliana
cctctagagcggccgccctttttttttttttttttaaagaaagcagcaaatcattgataagagattttgggttcaagaaaaacattgaaagtaacacatacacaaataataaggctttttaaagaaatataaattgagtcttataacaatacacaacagacccaatctattgggcccaataaaactagggcctctatagagtaacgcaaagaggaggaggaagaggaagcacagttttattttgaaagatacacaagtagaggggagccatggcatcaccatcctctgggaggtcctcctgaggactgcccactcaatctgtcgaggagggtgttgaagtcgatgggttggccactctcttccatccgctgaataacagccatgacatggtctcctctgaaacccatgctcactagcttctctatcagttcaccgtattttgatctcaacacaggtggtgca

SEQ ID NO: 401 - DNA, 462 bp, Arabidopsis thaliana
cctctagagcggccgcccttttttttttttttttttttttttcgataacgtttattgaaatttcaaatcagaatgtggattatatgccagatataaatgcaagatggttcagcttacatggccattgcaataaccttatttctagaatacataagctgttttctcctacggccataaagagtctatagttttgaagacagggcagtcttgtggtcgagagcaatcatcacttttccaattgccttcctgtctttgaggtccccgaatgcaagattggcctgggagaggctataggtatgagagatgtgaatagtgatcaatcctcgggaaagccatgacaataactctttgatggaatcttcaaggacattgggctgatggatcctgtagctaccccagtaaagaccatgaaccgtccagttcttaacaagtgctatattagcaggaatgacaggtatttcg

SEQ ID NO: 402 - DNA, 462 bp, Arabidopsis thaliana
  misc_feature (1)...(462): n = A,T,C or G
gcacaagtcgtttgataagcaggtaagtaacaaaaagatcccaaacgaaaatattctccaagtattttgatcacatttcatctcatgtacacatacacacaagtttctccccacttttatttttaaaggctttaattaataacctgatttggaggagaagaacctgcttattcctctagaggctttctctggggtcgcgttagtagatgaacctgaccttgagagcctggaacccactcgtgatggcgatgtcgtcgtatcgctagtctctgaatcagaggggcattttggagactccataaatctaggaaccnnnttaaccgaatctccttcgtctactacggcatagttctttgggactgaggtagtggtggtgcctagttcctcttcttcagaataggactcatttcgagtttgtggtgacctcatttgctcaggttgtggccgaaatgacttcagctg

SEQ ID NO: 403 - DNA, 462 bp, Arabidopsis thaliana
aatcgaaaatgcgtgattcccagctccaaaagtttcgagatgagcttaagaaccgatctcgggtattaaagaaacttggacacattgatgctgatggtgtcgtccaggtaaagggacgagctgcgtgcttgatagacacaggggatgaattgcttgtcactgaactgatgtttaatggtacttttaatgatctggatcatcaccaagtagcagcccttgcaagctgtttcattcctgttgataaatcaaacgaacaggtaaatttaaggaatgaacttaccaaaccattgcagcagctccaagatagtgcacggaaaatagcagagatacaacatgaatgcaaactggaaattgacgtggaagagtatgtggaatccaccatcaggcctttcctgatggatgttatctactcttggtcaaagggcgcaagctttgcagagattatacaaatgactgacatat

SEQ ID NO: 404 - DNA, 462 bp, Arabidopsis thaliana
  misc_feature (1)...(462): n = A,T,C or G
acttgtacatgagcatctcaaccaggttccatcttatggtcaccgcgaggttctgatattgtactcagctttatgcacatgtgatccaggcgatatcatggagaccattcaaaaatgcaagaaatccaaattaagatgttctgtaattgggctctctgcnnnaatgttcatatgtaaacacctctgccaggaaactggcggattgtattcagttgcagtggacgaggtgcatctaaaggatcttctgcttgaacatgcgcctccacctccggcaatagcagaatttgcaattgcaaatttgatcaagatgggtttcccacaaagagctgctgagggttcaatggcgatttgttcgtgtcataaggaagttaagattggagctggttacatgtgcccaagatgcaaagctcgggtatgtgacctccctacggaatgcactatctgcggtctaacacttgtttc

SEQ ID NO: 405 - DNA, 462 bp, Arabidopsis thaliana
  misc_feature (1)...(462): n = A,T,C or G
ttttgatgccaaactcttgagcataattatctttagcataatcattgagttgcaccgtctgtaagatatctttttctcgatctatcgggcgctgacaggtaaccttcagcaaagcantgatctgtctctcattcaatcttttggaataccgctggccttcaacaatcttgcatacctccattggtaagtaattaggcctattagaattcccaacttgcaagcatggtagttgagtgtgctgaatgcgaaaaccatatgtttcgtggaagtattctacaacagatttctgagtatttctttcatctactgggaatgtcaattcctgagtggccacagcagtcaaaccggaaatgcggtacttccggcgcatgtttcctcgatgagtcacttcaactttgacacctctaaaagccttttttatcttaacacgatcagcatcagataaaggtcgagaagaaatat

SEQ ID NO: 406 - DNA, 461 bp, Arabidopsis thaliana
ttttttttttttttttgaattaagatagtttaagtatgcatattcaatcgacaagcttgtatatgggaattttggcgacaaaacataagatcccaaacgtatctacttgaatttgcacacaactggtttcacaaatccaaaaacttaacagaaaattgggggaaaaagactgttagcaacatgagatggagcagtcatcgctacacttttgctctgtacagagaatatcccctcagagtttcataagtcgagttgtatcctctgctatccatcttagtaatacttgagagcttccttaactttgcaagttgcaactcaaccttgcagagattgcctctggcaacattgtgattcctttcctgaaagaaccaactgtttgggccctttggctttgacagaagcggcctcagtttcccattccacaacacaaacctgggaatgggaaacaatatctactccgc

SEQ ID NO: 407 - DNA, 461 bp, Arabidopsis thaliana
ttttttttttttgaagtaattttaatctgcaaatgaattattacatatattgtcatgtcgtatatgtgtgagacagtagtagctcaccatgtttcatatcttaaaatggagcaaagcagaggtcccgtcaagtcctttggcattgaagtaagtagcgtagtctttaattgtggtctctctgtactttggaggattttcttcagacacaagctctctaatcggtccgtacattctaggattcggtcttactccagtggtaaagaaacatgcgacagacactcgagctcttgttgctctgttcgccaatactctgtgctccaaactgatgaatttgtcgtttgttataagctgtaaaagatctccgatgttgatgatgagagcgccggaaacatgaggaacatcgaaccagtgcccttcacgacgaacctgaagcccttcgatctgatcgggaagaaggacag

SEQ ID NO: 408 - DNA, 461 bp, Arabidopsis thaliana
ttttttttttttttttttctgcaaactttcaatgtatttagtgatactgtaagattattccaacttgatatactgacaatacatatttaggtacactaggcacataaactttttctaactcaacaaggaacaatcaagtggagttgtgtatcatgtttcccgattcagtgctctgttcctacgagctctcaaaaccaaatatccggaaaacaccttcatcagtattatacttgggattcttgtcatcacctgcatatgcaagtaaattgtatttgggattccactcaacactgttcatggctgcccgacatggaatctgatgcaccgtccgcccggtttggacattagcaatatcaatgaataaatcttcactggctgaagcaatatactctcccgaatagttgaagcttattgttctgactggccactcaagtttggtaaatgttctcaaacaaagcatg

SEQ ID NO: 409 - DNA, 461 bp, Arabidopsis thaliana
  misc_feature (1)...(461): n = A,T,C or G
tcctttgtaaattctttgctcacggtgcatgcttgaaaggggagcactgtgaattttctcatgactggaaggatcctacaaataatatttgcacctactaccagaaaggaatctgctcttacggaagtcgatgcaggtacgaacatgtcaaagcttccaggcctcatccatctgcttcatcttcgtccgctgtgcctcggccatctcctgcttcagcttccaacactcttgcctgtgcttttcttcctggtgtcgcggaaagagatttgagcccagttccttcttcatctttaaaaccaacgtggaatttggattctcttcaccaggattccgtagacgaggtcaaaacttctaaccctggtacagtcaaacctgaagaactacccatttgctcatttgctgctgctnntgattgcccacgtgggaatgaatgccctcacatccatggaactatttgccca

SEQ ID NO: 410 - DNA, 461 bp, Arabidopsis thaliana
cacttaaggtatggagtctaacggcgacgccactgaaacaattactccgtctatcctcttcttctacacgtctcgccaccacaatatatggacgaagatcctaccacttatcacctgcgctacgatgtgcctccgcagcttcttcttcttcttccagtgccacgacggctgaaacttctaaaccctccggccgcaatcgccggtctgcgtcatcttccaattccacctctgatcgtgaagctatccgctccattcgccttaaaaaggttgaagaattgagaggccaaggtcttgaaccttatgcttataagtgggaaaaatcccacagtgcaaatcagcttcaagagatatataagcatttagctaacggtgaagaatcagacaatgagattgattgtgtttctatagctggtagagtcgttgctcgtagagcctttggaaaacttgcattcttgactctc

SEQ ID NO: 411 - DNA, 461 bp, Arabidopsis thaliana
acgtatgtaatagcaaagataaagaaggaaaatgatgaaggcacttatgtattactgaacggaagtggggctacaccacaagggaatgtgcccttccttgacttgtttgacataaatacaggcaacaaagaacgaatctgggagagcgacaaggaaaagtatttcgagacagttgttgccttgatgtctgaccaaaaagaaggggatttaaaaatggaggagctgaaaattctgacatcaaaggagtctaaaacagaaaacacccaatattctctccaactttggcctgataggaaagtgcaacagattacaaactttcctcatccgtatccgcaattggcttcgttacagaaagagatgatcaggtatcaacggaaagacggggttcaacttactgcaacactatacctaccaccaggctatgatccatcaaaagacggtcctcttccttgtctgttttg

SEQ ID NO: 412 - DNA, 461 bp, Arabidopsis thaliana
cgaggaaacagggaggatgagtttgacgttgaccttgaggaattgatggtcatggaagcaatatggctctctgttcaggaaacagggacgcagagaaattcagcttcaggggaaattacctcttctaggcagtatgtaacagataatcatagttatgtttcttcaccaccacgagtgactccaatcgtagaaccagcaacaccgtcttcatcatctggtgggctttcttgtgcaatctccgcacttgctgaacgccaaatggttggcgaatcctccagtcacaatcataatcacaatgtcaacgtttcttcatacagtatgcttcccggaaattgtgacagttactacgacatagaacaagaggtagatggcatagacaaccatcatcatcatcgtcatcattacgagatgggagaaacaggaagcagcaacagctatgtaagttcttacatgacaggcga

SEQ ID NO: 413 - DNA, 461 bp, Arabidopsis thaliana
ccacgcgtccgcatcaaaacacaaacccggaaagcttcgtctgccatttttcattcttctaagccctagctcaaagctttctctctcaaatccgccatgactaaacagcacgcgaactggtctccttacgataacaatggaggaacatgtgtggccatcgctggatcggattactgtgttatcgccgccgatactcggatgtctactggttacagtattcttagtcgcgattactccaaaatccataaactagcggacagagctgttttgtcttcctctggcttccaggctgatgtgaaagctttgcagaaggttctcaaatccagacacttgatctatcaacatcagcataacaagcagatgagctgtcctgcaatggcccagcttctctccaacacgctttatttcaagcggtttttcccctactatgcctttaatgttctaggagggcttgacgagga

SEQ ID NO: 414 - DNA, 461 bp, Arabidopsis thaliana
cttttttttttttttttttttttttttttatcaaaggaaaaaaatcgtcataaatgtcactagagagaactaaaacagaattaaatcaaccaaaacaaagcctttctcaaaagccgttcgcaagcaaatgtttcttcttcagtacattttatttagaaggaaaccatggtgaattactaatggcaagtctccagtctttggacacacaagactggtgaactttaattgaatacacaagacgtgaaacaaagaagcagaaacactttccgactagtcagagagagaggtggaggcttggtcagctgtttccttcaggaggttggcgtgatcgacgctgcagtaaaggctctttttggctgaattcgtagtaagaacgaagcccgtgtacttctcccgcgacctttttaagcagatgttagctattaacttgaacatctcgttcccctccttgttgtgatagg

SEQ ID NO: 415 - DNA, 461 bp, Arabidopsis thaliana
tctgatgctcgaaatcatcactggcaaggagatttcaagtttcagctatggcaaagataacaaaaaccttctttcatatgcatgggactcgtggagcgaaaacgggggagtgaatctactggaccaagatcttgatgattctgattcagttaattcagttgaagcaggaagatgtgttcatattggtctgctctgtgttcagcatcaagctattgatagaccaaacatcaaacaagttatgtcaatgctgacttcaacaacggatcttcctaagccaacacaaccaatgtttgtattggagacaagtgatgaggattcttctctgtctcactctcaacgctccaatgatctctcctctgttgatgaaaacaaatcttctgaagagctaaatgcttcctcatgaatgttccaatcggattcgttcacgtggacttgcgttgttttgtacctcggccgcgacc

SEQ ID NO: 416 - DNA, 461 bp, Arabidopsis thaliana
agcgtacatcaagtatttttggcgcgcgatgatctttctttctatgatgcaatacaactgtaacaatgtttatcatccaaatctagttaaataattaagagtaaacagctacaaaaatggctcttctttttcttctccatatgcattttgtctatacctaaaaatattattcatttcatttttctcctcttcttcagttacatttgttgctgagagtcacagtattgtggatacttacaactgcaaggatgatttctcaccttccgtaatgtgaaagatacccttctagaacttcttctgatcactttatccttcaccttgtcaatcttgtgatgtggaatgtagtgattccaagcatatcgtgcttcaccggataataagagcatagaccgaggaggaagatataaggcctttttgatgcaagaggagtcacccgacttctcagcatcggtagttgaggc

SEQ ID NO: 417 - DNA, 461 bp, Arabidopsis thaliana
tttttttttttttttctttcaaattccttcaaaattgttgaaatagtaatgaatttccgacagaattttgccgaatatacatattgttccccaaacatgaactagcaaagtgaaaaaccaagctatgtttcgctctaataaaatgttaaactagcactcgagcataaataaatattctgcggctccaaaattttcatgtgaacaattatattccaaaaatgtggtttgttattgagcttggtctcgattccgattatcatcgctgatcttttgaagctgcttctcacttgtggcgataaggcgctttaccatgtcgaaggttgtaagcctaatactgctgtttggtagagttttcaatgcattgggtaaaaagccgcggtacaagcctataagcccatcacggtctataattccagcaaatgcctccggaattgatttgtatggagttcctctcatttgca

SEQ ID NO: 418 - DNA, 461 bp, Arabidopsis thaliana
ccacgcgtccggtattatgacacgaaaagcggaaggtttgtggggaaacaatcaaggctttaccagacttggaccatagcgggtttcttggcagctaagaaactaatagagcaatctgagaaagcatcactcttgttctgggaagaggactatcagctgctcgagacttgtgtctgtggcctcagtaaaagcagcggaaggaagaacaagtgttcgcgtttcacacctccaagatcttagtttcctgaaacttaataaactcacgaaccaaagtccatatttaatcatattttgcttctgacgtttagcaaaacatccttgctaattaggacgatgaatcagtttcaaacttaacgtatttttaatttgaaaaaaggaatatatatgtttatgtttgccttttccttcttgtcggattacttttaaatctcaatgatgtggatataaataaaaccagattc

SEQ ID NO: 419 - DNA, 461 bp, Arabidopsis thaliana
  misc_feature (1)...(461): n = A,T,C or G
tttgggcaaaggaagctttcattaatctaactcctcaagagaggtgggtttatacaaagtaaaattaaagcattacatgnnngntagagataaagattccatgagtcttccaaaatgcataacttcgagaaggttgcaagggatggtagatctattgggacctgcagagattcaagcttgaagactagcttcgagaaatctcggatcaacttgtgatcatagtaagctcgtgcgatcgacgcataaaagcttttgttgaaatgctccaaagaggaggctgcggtgtgagacttttctccgggttcaagtttcaaagaggatatctccttagaggagtaaggtttcagggaaggtatctccttagaggaataaacataatgcaatcggcaacaaagattacaagtccaaagcacagataatcttctaatcaaatgacagagataaaccggattcatggggct

SEQ ID NO: 420 - DNA, 461 bp, Arabidopsis thaliana
ctttttttttttttttttttttaagcaatgccatcttggcaaaatatcgtacatttttcaggccaaaacataacagaagaaaaacataagtcatttaacagaagcaagagacaaagtcatggacgaagaagacacacatttcatgttggtttgtagtatttggtggccacgaatggcatcttcgtgatgctgccttcatatggtttcccacggaccaagatcttgactttagtcccagtcttgtgctgacctgacttcacatatcccatggctatgttcttcttcaggttcgggctaaaccctccacttgtgatctctccaatcttgttcccactctcatcatgaacctcgctatgcgaccttgctggtggtcctgaggagaagaaaccgacccttctgattgtaggtccatctttaagctgctggagaatcacatccgcgccaagaaatccaccttcggc

SEQ ID NO: 421 - DNA, 461 bp, Arabidopsis thaliana
ggtattttccagaataaacgtagccaaactcgtaactgaaataggaatactactgtttggtgctactgagaacgggagctttagaggaatctaacaaaaaaacttgttaccaagtaaaattctacattttatggttctgattttgcttcttctcaacttgagctcttaaagaaaggatggtcaagagcttcgtttgctgtgagacgctcagatggatcatatgccaataaaccatacaatagatctgcaaatctagatctcgtgttgtcaacatgtttcgataccatatccttgagacgatcaagtctttttacagccctaatactttctctagagttggctccttctggccaattcaaccgacaccctctcctgaaatatttctcagcaccccggctggcttttcgagtcatatgttcaggtaaaggtccaagcgccctctccatcatagctagatgttc

SEQ ID NO: 422 - DNA, 461 bp, Arabidopsis thaliana
  misc_feature (1)...(461): n = A,T,C or G
taattacttccctaatctcttctattttgcttaaattcatccacaaagacttccatgagatttatgcaagaatgtccctcctcgatcggtttcttcttcttatcgtgcatggagtggataagatggttccatggcataagcttccagtattcttggggttaacctatcttgaagtacgaagacatcttcaccaacaatacaatcttctcaacgtcggtcaaactccgactgggatccggtttgatcctgctaattatccgtaccggactgctgacggaaaattcaatgatccctttaatgaaggcgtcggcagtcaaaatagttttttcgggagaaattgtccccccgtcgatcagaaatcaaagttacggaggccagaccccatggtggtggcgacaaaactattagganggaaaaagtttatcgacacgggaaaacaattcaacatgattgcagcttct

SEQ ID NO: 423 - DNA, 461 bp, Arabidopsis thaliana
gactcccttcaggtggggagaagcttagctcaaagaccaatggaggatcaaaaagggagctactgcttccaagggatggacttggacaaattgctgctcatacatttgctttccgcgagcttgctgctgcaactatgaactttcatcctgacactttcttaggcgaaggtggatttggacgtgtctacaaaggaaggcttgacagcaccggtcaggttgttgctgttaaacaactagacaggaatggtctacaaggtaacagagaatttctggtagaggttcttatgctcagtcttcttcatcatcccaacttagtcaaccttattggttattgtgctgatggagatcaacgcctcttggtctacgagtttatgccgttaggatcattggaagatcacctccacgatcttccaccggataaggaggccttagattggaacatgagaatgaaaatagctgct

SEQ ID NO: 424 - DNA, 461 bp, Arabidopsis thaliana
gcggtgccacgcaagaagcttacttcttttaagagggaagatggagtttctgatgacacatcagaagatcattcttataagcagcaatggagggcttccgggaatgaggaagagtcttattttgagacagggaacacagcttctggtgattcatcaaatcaaatgtctgatccgcacaagggaattatcagacataaaggttataaagaatttgagtcagatgatgaggtttcagaccgttcacttggggaagagtatactgtacgggcatgtgcagcttcagagagctcaatggagaatggctctcagcattcaatgtatgaccatgatgatgatgatgatgatatcgacaggcagcctagggggattccaaggagccaacagacaagagtttttaggaatccagtttcatatgagtcagaagataatggcgtttatcagcaaagcggaagaatatccat

SEQ ID NO: 425 - DNA, 460 bp, Arabidopsis thaliana
gttgatacagttgagtttgcaacataaaaaaaaaacacattacaaaatctacgaaaatatccctggaaacaatcctaccctctgtgtcttgtgtaaaggagatttatccagagaggattaaatatgaaagctgagctcattcctcattcctcactcagatttggccttaggtttctcttgttcttcggtgagaggcttaaacacaactttgaagaaccaaactgcaagcaacgtagccttcacaggtccaagccaatacacaagtaaatgctctttcgttatatgttcaccgcgtgcataagcccatcccataacagctgcagggttcatgcatccaccggtaagatcagagccaagaatatgaagagttaacttagcaagactaccgatccaagtcttcatgaagaaacttcccgggatttttcttgttagtcccattgagagcagtacaatgaagaat

SEQ ID NO: 426 - DNA, 460 bp, Arabidopsis thaliana
gcggccgctttcgctctacattggctctgtgttttttgaattatctattgatttccattagggttttctcacttctttgatcgattgaattatatatgttccgtcaatccatggcgtttcctccaccgatccatggttccgatgcaccgccgccgccacagccgccgtcggtggtgaacgggattgaaacctctagacggcagcagcaacagattgcagcagcttcttcttcgccggtgaaatctcatccgcttcataacttccctttgtctgatctcagatgggctatgaatcacgccaatacacaccggctccgcaaagcatcgagtagatctccgcttcgtgaagctaatactgggaaaggaaatctggtgattgaggaggtgaacgaagcttcaggttcttcgtttgaattgagaccggagaagaagaagggaaacgcgtctggtgttagcgattc

SEQ ID NO: 427 - DNA, 460 bp, Arabidopsis thaliana
  misc_feature (1)...(460): n = A,T,C or G
gcttcgtgctactactcaaaggactatccgtatagcggcgacgctccggcgtgttgctcgacctttcgctactgacgcggtggttgagtcggattacaagcgtggtgagatcggtaaggtctccggaatcccagaggagcatctttctcgcaaggtgataatatactcacctgctagaacagctacccagtcaggatctggaaaactcggaaaatggaagattaacttcgtctccaccttaaagtgggagaatccgttgatgggatggacttctacaggtgacccctatgctaatgttggtgactctgctcttgcttttgattctgaagaagctgctaagtcttttgctgagcgtcatggttgggattataaggtcaagaagcccaacacaccattattgaannntagtaactatctttttgctaatgccgcattatgacttacgagctctactcatatg

SEQ ID NO: 428 - DNA, 460 bp, Arabidopsis thaliana
gaaaaaaaaaaagaagggacatggacgctattgattccgtcgtggatcctcttagagactttgccaaggacagcattcgcctcgttaagcgttgtcacaagccagatcgcaaagaattcacgaaagttgcagtccgtacagcaatcgggttcgtagtaatgggattcgtgggattctttgtgaagctcatctttattccaatcaacaacatcatcgtcggtgctacttagataacaaagggaagataaaagatggagaagggtagttacagctttgttgttttcatgaagacacttcacagtttttttcttttttcttgttcagatactcaaaaagaggaaacattttgtgaacctagtttaaccacacatttgggatcaatctctagtaattttctttctgtttaatgtatgtcactgtttatttcactgttccgttagaaaaaaaaaaaaaaaaaaaa

SEQ ID NO: 429 - DNA, 460 bp, Arabidopsis thaliana
ccacgcgtccgaacgccttgaaagactcaaggctcttagaatgaagccaaagcttttcaacaacaacagcctcatagttcttgatcttaccaccaccatccttcgccgcaattttcagatcgtactttgtaccggagaccacttgcgtcgttccctccacaaccttgacgaaaaccaacttctccttcgactccttgttatgttcctcgatggcatacttggcgaccgcaacaacatccggatcagatacattcttgatcggcttccggctaccaagaccaccaccaccaccgagaccttccacgacggagacaagtgggaggaggatgagagagagacagatcaacgacttcatcatcatattttcgtttccttaaccttttttaattttcgtgtgtttaatggtctctggtgtttattatatagacaagacttgtagaaaaaaaaaaaaaaaaaaaag

SEQ ID NO: 430 - DNA, 460 bp, Arabidopsis thaliana
aagcatggtagagaacatgcatcatggcaccagagaggttctggagcacctactaaagctttggaggatggacaatttgtaacctcaaatcagcccatccgaggaacagtgaactatcactctagtaagcaaaccgaacaaattgctgccaaggatcaaaccacatgtaataaggatggatggaacgatggctggtatatgactcctgaaacgcattactctgctgccgaagaaatggaatccagtgctgttggaaaagatcaaggaatgagcatgcacggcaggcagcatgcttcaagaagcaacaaggatggaggaagcaactatggtgaccctaaaaaaggcaataagagggatttcaataaagctcatacgcagcactctggccatgggtttagccaaccagatttgcctgctgcttcaaaagaaggtcgtgtccctggagatcatgtgtggcata

SEQ ID NO: 431 - DNA, 460 bp, Arabidopsis thaliana
  misc_feature (1)...(460): n = A,T,C or G
ttgaacaagacgatgcagcggcggagacggtggattcctccaccgttaaattcggtacaccggaagcactggagtatgtacggtcgctcacggacgttggcgcaatgacacgtcttcttcacgaatgtatcgcttaccagcgannntagactcagatctcgacacgcttctatcgcagcggacggagcttgatcggaatctcgttcagcttcagagatcggcggagattctcgatatcgtgaaagcagatgcagatcacatgctcggaaatgttcgatcgacttgtgatctcgcggatcaagtcagtggcaaggtacgagagctcgatcttgctcaatctcgtgttaatgttactctctcccgcattgacgcgattgttgagcgagggaattgcatcgaaggcgtgaagactgctttggaatccgaggattacgaatctgctgcgaaatttgtacagaga

SEQ ID NO: 432 - DNA, 460 bp, Arabidopsis thaliana
ttgattatcataatattttatgctctgaagaaagaagtgacgaacaaagtgttttcacttcccattacattagaggctcaaagcaaagcatatatagaagagtacatatacgtataaccccaatgcctttaagtcttcgacttcacctgaaagacctttaaacactgatccaagcaaagttggaagattaacacgatagaaggaaccaatttcaatgtggatggatggtatggtctggttgtaacctctctagaggtacttgatcataccccgaccttcaacgctcactttcgtagcttgtagccgcttcttctttgttccttttagctgctgaagtttcttgttcatcttgacccgacgctggtcctgagaaacctgttttgcacgggctatgatctcatctggatcaatcttggattgaggacggatcaaaaagtccaatggggttgcttccggcctc

SEQ ID NO: 433 - DNA, 460 bp, Arabidopsis thaliana
  misc_feature (1)...(460): n = A,T,C or G
tatcctcattcctctctaccatatatatctgtattacatttttattctcacaatcacccgatctccttgaaagaacccaatttagtaaaaacagacaacatttctttagccttctcatacaagaaaatatatataagcaagacctttttgccttatataaaaccctacaccacaaacaccctttcagtattactcatctcatttcaaaagcattagagattaagaaaatcatatttatatannnnnccacactggcttatacgaagaaccttagaaataaaacaatggccatcttacggcttacgagcactgaggagcttaacatcatcgatcacgggcccacacagtgatgagaaatcatcgcttctcatcgagtaaaatgtgctgtaaaacataactcttgtgcgggtcgaaaccgccacaaaccgtagagaagcgcgtttgaaccctcctttgcctc

SEQ ID NO: 434 - DNA, 460 bp, Arabidopsis thaliana
ttaattttttcatagccatggctaatcgttatgatccaaatcctttcgctgaggaagaagaagtcaatcctttcgctaatgctagaggagttccacctgcgtcgaattcgagactttcgcctttgcctccagagcctgttggtttcgattatggtcgaaccgtagacattcctcttgacagagctggtacacaggatttgaagaagaaagagaaggaactccaagccaaagaagctgagctaaaacgacgagagcaggacctcaaacggaaagaagatgctgctgcacgagctggaatcgttatcgaagtgaaaaactggccgcctttcttcccgcttatccaccatgatattgcaaatgaaattccggttcatctccaaagactacagtatgttacctttgcaacgtatttggggttggttctttgtcttttctggaatatcatcgccgttactacagc

SEQ ID NO: 435 - DNA, 460 bp, Arabidopsis thaliana
tttttttttttttttttttttttttttttaaatctcaaaaatgtccccaaacgcaactgcaccatacacaaatttttcgttcatatagaccacttcctaacaaacaaagacaaaccttagacaaatcaaagagacacgaattatccatgagaaagagagaaagagagaaagagagaaagtttgtaaaatctctctatctctctcaatcctcaatcccaaaaaaagatatcaagtcaaacaaacaaaacaaatagtttttttatttaacaaaagggcaaacgcatacgcacatggctaaaatctgtccaccagcgagttttgagtgaatgcgttgtaaaaagcctgcccttgttttggattgttgtccttctttgagaggatgatgattcagattcagatcatgttgttgttgttgtcgttgtcgttgctccagagatgtctcggctggatctattgtatt

SEQ ID NO: 436 - DNA, 460 bp, Arabidopsis thaliana
ttttttttttttttttaaagagtacaacaatgttgattaacttagttcctctgtacattgaagattccaaatttgttcatggagctacaacggttcaacaataattcaagctcaaaaaccaagaactctaagatgaaacacactcacagacagacatgaaagtgatggaagatagataggtatgagatcataagtctgtcttcactctttagttgaaggtttggacaatagtgttgtgccatgggtcagacaagtgctgcaacagattctcaaatggtccttttccagtcacattgtgttgaaccacaaaccctaagaatgccaacatcgccaacctcccgtttgctagctctttctccttggcctcttgcgtaggagcaaagttaagcgggttaaagattccaccagggtaaccaacttcacccttaggtaagctgtattgcttaaagatagggtcttg

SEQ ID NO: 437 - DNA, 460 bp, Arabidopsis thaliana
gcggccgcttaatactctcatcaaccaaaacttttacatacacccctgaacccaccatccatctaaacaacgcaggttagtttgtcattacttgcgacggaagctacccgaatatagaatcgtatgttatcgatcaccggtttccgccaatgtcttctgataattcttcaaccaaatcctcaaaaatctcaaactcgatatccaaaaccgtctctgagacatctgcgtcgttctttgatctccataatcccaatctctctgttctgaaatcatgttcgaccatcatatcgattgtgtttgactccacatctctccaagatctcaatctctcgcatacccttttggctacaatcgcggcttcagcttcaccgtcgatgtcgcttggcaattcctctgctgcaaggtctgagatcaatgcttctacgccttccggaacttctaccatctcttcaaagtatgt

SEQ ID NO: 438 - DNA, 460 bp, Arabidopsis thaliana
aggatgtgacgattacatatttattcaacgaagttgatacataagcatttcagtatattattatgttttttttggaactgagtttttaatcattgcttacacatcatctatggatccatcacaaacacagctccaactctatcacgcgggatcaatcttagttcagatccgtgcttcagaaaaacgtttcctgcactctgttgaggattgatcccgatcccatcattagtgatgatggcgctggtttgtggaggaaccttgaactcttctgctgcgaatttcagaaccgccgtgaacggagctccttctggtacgctgaaaactttgaaaggaagcttaggatccgaagtcagagtgactttgaaggagacttttccaccagtggccattttttccgacgggggaggagattcagattagcacggcggataatggcgtttcaatgacgccggacgcgtgg

SEQ ID NO: 439 - DNA, 460 bp, Arabidopsis thaliana
  misc_feature (1)...(460): n = A,T,C or G
gcggccgccctctccaatggcggttcttccgacatggcttttagcaatgatgtgtttactcttcttcgtcggagctatggagaacactacacacgacaacatctcttctctccctagatccgacgaaaccgaatggaaccaacacgcagnnncgaatccagatgaagtagcggacgaagttctcgccttgacagaaatgagtgtgagaaaccataccgagaggaggaaactaggttactttacttgcggaacaggaaaccctatcgacgattgttggcgatgtgaccccaattggcacaagaaccgtaaacgcctagcggattgcggtatcggatttggaagaaacgcgatcggtggtcgtgatggacgattctacgtagtcactgacccaagagacgacaatnnggttaaccctagaccggggactttacgtcacgccgtgatccaagaccgaccacta

SEQ ID NO: 440 - DNA, 460 bp, Arabidopsis thaliana
  misc_feature (1)...(460): n = A,T,C or G
gctttaaccactgatgttcaggagtttttccgactttgtgatcccgaaaaggagaacctttgcctttacggacatccaaatgagcactgggaagtgaatttgccagctgaagaggttcctcctgagctcccagagcctgtcttgggtatcaattttgccagagacgggatggcggaaaaggattggttgtcccttgttgctgtccacagtgatgcttggcttcttgctgttgctttcttttttggagccaggtttggatttgacaaagctgataggaagaggcttttcaatatggtgaatgacctcccaacaatctttgaggttgtagctggcactgctaagaaacaaggaaaagataagtcctcngttnccaacaacagcnnnnacagatccaaatcaagctccaagcgaggatctgaatcccgtgccaagttctcaaagccggagccgaaagatgatg

SEQ ID NO: 441 - DNA, 460 bp, Arabidopsis thaliana
  misc_feature (1)...(460): n = A,T,C or G
cggccgcctatcctgaattaatatagtaaagacaaacaaatgtaaaatgttacaaagaacaaaactgtttcacccacttgaggaaaagagaaataacttatgatctggagaattccccagagctatccattattagtacgttgccaaatacaaatcagaaaggaaaaccaaaaaaagaactcactcttcaaactccttcctcagcccatcatcttgaagatgtctccaaacattccttgcaaaggattcttacgctgcacaccataaaacctctctgcaatctcgtccagcaactcgttaagcagctgatctctatctatgcttgacttatattttactcttaacatattgaaaagaggtaatgcannnctctgcaacgtttccagaagatatgagataaattggataaggtccgattctgaaagctcaggattttttgtctctgcttgtttcttaatct

SEQ ID NO: 442 - DNA, 460 bp, Arabidopsis thaliana
tttgtacatagatgcaatggttggagtcagcgaggagcgatgctgggaacaaagccgctgctgagatcgcttcctagaaggctcgacgactcgtaaaggtctcttgtcacattcgacgacgatgttgacagcactgacgaagatgacgccaattccactcttgtctccctatcgggggatgcttggagcagtgactccagctccttcaccacctccgccattcctggcctcatctctggtgagtcgtggctacacctcagtgccaaagccgcaaacttttcaacactttccatcgaccacggctccattctcttgtctatcagcgataccatcatatccctctgctcagccgtcttcacctctcgtactatattttttccatgggatatggcgtgcataccagtcagcagctccaagaacacaactccgatgctgtaaacatcgctcttgtccgtcagct

SEQ ID NO: 443 - DNA, 460 bp, Arabidopsis thaliana
cggccgcttttttttttattttcaaccaaacctttgattattaattacttttataaattacaaaaaaccttggattattagaaatactttaccaaatccatggtgaactttaacattcttaagaaacaaacgacccacgtatatttatgtattatacatgcctaatcaaggcaatcctcccatgagagtagtggatgacaatttcgtatattcaacatccctcagcgagtcttgtccttgcaggctcttacattggaaataagcaacggtgtaagtcacaagctgaaacatcctcaccacaaagaccgaactcataaggaccaaaccggtggttaaggtaaccgagaatgaactactccaatcgaccagccgcaagatttgaactaatccaaatgacaataacccaaagaaaagattcaagaggaatagttttggcttcatccctttaacaatctttgca

SEQ ID NO: 444 - DNA, 460 bp, Arabidopsis thaliana
tgtgtgaatgaagctgctgaaacctttatctgttcaaaggcagaagagaaggggaaagatcggtctaagcagttcatggaggcgttagatattctaagttcgaacaaagaattgttcattacactcttacaagatcctcattcattttcggcgaaaaaaagcttagacttggagggatctaaggtaaaagaaccgcgtgataaatctccatcaatggctgatgatttggatagcattgttctcttgaagcctagattatcaagctcggttgatgataaagtgtacttgagattcaaacatctagccaagaagttgaaacttgttgttggatctaacaaagacagcaatcacgcagaaaacaaacccgaaggtagcagtagaggtagagaaatcgaggctgctgcttttagaacaagtgatgtttctaccagtacagttggtcatagaagcccggagtcac

SEQ ID NO: 445 - DNA, 460 bp, Arabidopsis thaliana
cgagatccaaatcctcagtttcattttcatctctctctctcgtattgatcagctactcgaaactccggtaacggattttcacaatcccggcggcgaaactcttcttcccggctaagttttcattttcttcagattcctcgtaaagttgccggtggaccaaggtccaactcttgaacaccccaaatcatgaatcccttttcttctggtactcgtttaagtggacatatgagtatgattcagggacatgatccgtgccataagagcatgcaaaacagctgcggaggagcgagctgttgtaagaaaggagtgtgccgatattcgagcattgattaatgaagatgacccgcatgatcggcaccggaaccttgcgaaactcatgtttatacacatgctgggttatcccacacactttgggcagatggagtgcttgaagctaattgcatctcctggatttccagag

SEQ ID NO: 446 - DNA, 460 bp, Arabidopsis thaliana
gggagagaaagcgaaagcaaatgtgttagtcttctcatttccgatacaaggtcacataaaccctctcctccaattctcaaaacgcctactctctaaaaacgtcaacgtcacattcctcaccacttcctccacccacaactccatcctccgccgtgccatcaccggcggggccactgctcttcctctctcttttgtccccattgacgatggattcgaggaagatcacccatctacggacacatctcccgactacttcgcaaagttccaagaaaacgtatctcgaagcctctcagagcttatctcctcgatggacccaaaaccaaacgccgtcgtttacgactcgtgcctgccttatgtcctcgacgtttgccggaaacatcctggcgttgctgcggcgtcgtttttcactcagtcctccaccgtgaacgcgacctatattcatttcttgcgtggagagttt

SEQ ID NO: 447 - DNA, 460 bp, Arabidopsis thaliana
cggccgcttcgtttttcaccccttccttcttctcctttagccgcccgtcgtcgatctctgcaacactttccgacgatttctccgtctgatctcaagtgacagtgaaaaccatttaaattcgttacttgtgagcctccttagaagattatgggtgatttagagaacttgcttttggaagctgctgggagaacaaattcagcagggaggagtcgtcatcctccatcatcgaggagacgtgagggttcttactctgatggtagtagcgattcaagggatgattctgatgaagatcgtggctatgctagtagaaaaccctctgggtctcaagttcctttgaagaagagattggaggcagagagagaagatcgagctgctcgagttgaaggtggttatggtgatggaccatctgatcgtgaaggtgacagcagcgaggagtctgattttggagatgacctttaca

SEQ ID NO: 448 - DNA, 459 bp, Arabidopsis thaliana
tttttttttttttttttttttttaatcgagaacatgatgatgaaattaactcttgaaaattttatccacaagaagaagaaaaaaggcaaattgaagaaactaataagaagttgcaaagaaataaaaaaaaacagaagaaagagagagagagattagaagaaggagtaggaagaagaagcatcaagaggatgaattaggtaagtcagcactaacgccaccaccattagcaaatacgctatcccttgatctatcgatgttccatcgctggtgggagcaggagctggagccagggattgagcgccggcgagagataagatgacggcgaatacaaaactgaacaacgcgaatccggtgacggagtttctcgacgccatctcttggtgattgatccgacgaaaatgatgatgctcgagagaaaaaatcgagagctctgcaggtgaaaaactccggcgagagagt

SEQ ID NO: 449 - DNA, 459 bp, Arabidopsis thaliana
tttttttttaagaaaatacatatgttatatatatattttaaatcatagttgaaacaatactcagcctagaaggcagacaatcattcctattcactacaaatctttctttatatacaaaactagttagaaaacaaaatcataagaatacttgtgggtgtgggtgtttgtgtcaagagtcaagaccaatttcgctcctgtcaaatgtggtttgttttctccttatccaaacataaacgagagatcatccataggaacctcatcaagacctgctgtatcaatatcctgaagaccctcgaaccagtttccaagatctgcctgttcatctatttcgtctagatcacggaacgctaatttcgagaaatctatgggagcttcgtcgtcgactgcaccatctccagaggtaactcctcggtttgaggcccctctgcttgctggtcctgttgggtgtgttgatgttgt

SEQ ID NO: 450 - DNA, 459 bp, Arabidopsis thaliana
ttttttttcaatccaattttcataccatatatcaagaaagatgaacaacaagagtcattgtcatgaaacccaaacatttatttagcaaaagagtttcagaaaaactgactcagaagattcccacaagagtttttgtgaaatttataggcttgaaacaaaagaaattacttcaaactgtcaggttcttgtagaaaaggagtgacttcatgcttcagaatctgtgctcaagcttctcctgttccttgaaatactgagcataccagtaggttccaacgacaggggtaacgagaagagtggcgctgatccaattctcagagaccttgtggtggatcttctccggcagatccttccagagaccggtcatgatcttctgctgaaacggagaaagtgcgtaaaccaccgccttcaatttcaccggctgcttccccattttctttttctcttcccagataatcccaa

SEQ ID NO: 451 - DNA, 459 bp, Arabidopsis thaliana
tgagcggccgcccgggcaggtggaaactccaagatatgctgtagttactggagcaaacagagggattggatttgagatatgcagacaattagctagtgaagggattagagttgttttgacctctagagacgaaaacagaggacttgaagctgttgagacactgaagaaagagcttgagatttctgatcaaagccttctttttcatcagcttgatgtcgctgatcctgctagtatcacatctcttgctgagtttgtgaaaacccaatttgggaaactcgatatcttggtcaataatgcagggattggtggtataatcactgatgctgaagctttaagagctggggcagggaaagaaggtttcaagtgggatgaaatcatcacggagacttatgagttaactgaagaatgcatcaagataaactactatggaccaaagagaatgtgtgaggcgtttattcc

SEQ ID NO: 452 - DNA, 459 bp, Arabidopsis thaliana
gctttacaaggatcactgttgcggtagagaccaaattccttcagagacagtccagattttggtggcacacaaaaatgaagtgtggtttgtgcaattctctaatagtggcaaatatctggccactgcatcaagcgattgtacagctataatatggaaggtactggatgacaacaaagtcgaactgaagcacacacttgagagccaccaaaatccagtttcttttgtctcgtggagtcctgacgatactaaactgcttacatgcggaaacgctgaggttcttaagctatgggatgttgacacaggtgtgttgagacacacatttggaaacaacaatactggattcactgtcagctcttgcgcatggttccctgactcaactcggcttgtctgtggcagttctgacccagaaagagggattgtaatgtgggacactgatggaaacgagatcaaagcctggag

SEQ ID NO: 453 - DNA, 459 bp, Arabidopsis thaliana
taatttaaagaaaacaaaaagtacacctaattcgggaaagacacactaacggaagacgaccaatcagaaccagtttggtctgaaaaggacttagagaatccacacaaatggcggcgcatccattcttgtcccaaccacagtccggtacagatacaacttatccactttctgcctcccctcgtgtccgttttcttccatccggttattatcattctcgtttatgatctctacattgagccatggcgctttctctgcgagccttttgcatccactgagtgtgacttcacatgaagacatccaaagggatcgcattgtttcatacttgctcacatcagcaagaagcgccgtgtccccaaacggactatcccttatctctagtttcttcatctttttgcaaccattcaacacatatagcatgcctttgtctgtatctcctgcaaaggctatggagagcatctc

SEQ ID NO: 454 - DNA, 459 bp, Arabidopsis thaliana
attgtcctgagatttcgatttctccaatctctcttcctccgtcgccggcgaaactatgtctcagtctatccaattctccagtccttcacacactcctcaccttctccatctccctcactcacaattcaaccgtcctctctcctctatctccttccgtcgcttccctctaacaaccatcaaatacacttccatcagagcctcctcgtcaccatctccttcaccggatctcgattcatcgtcctcatcatcatcctcgcaagtacttctctcacctaacggtactggtgctgtgaagtctgatgagagatccgttgttgctacggcggttacgacggatacgtctgggattgaggttgatactgtgacggaagcggagcttaaggagaatggatttagaagtacgaggaggacgaagctgatctgtacgatcggaccggcgacttgtggatttgagcagct

SEQ ID NO: 455 - DNA, 459 bp, Arabidopsis thaliana
agcttttgattggattaacagacgataaaggaatctattaacaatgagtgggcatatctgaagccgaccaaaggtaccccattcagattcttctaaccataaaaggaacctttactataatacattatataggtaacgaaatagttgtctgtatatgcatctcattcacatttgagaagattccttcatatgttgtgattttgtctaatacgcttttggaggaatcacgcaaactcaggggtctttaattggtgaaagaaggagaatgatggatgagtaactgagcattgggtacacatttgcatctaagaagtgcctatactgcttcatcgccgtttctctctctgggagatccggtgttatgcagtcgtaagggctcggtttgctcgtgtctacaaatggctcccatcggtatcctggcctattcggtagcgaaacaagtgtggctaaatgactggt

SEQ ID NO: 456 - DNA, 459 bp, Arabidopsis thaliana
tccgccaagatcccatcttcaactcacgttcaagatgagagccaagtggagaaagaagcgagttcggcgtctgaagcgtaagaggagaaagatgagggctagatccaagtaaacaactcgcctcaactcggcctactggatctgccacccacccaccatgacaactggcaaaccacacgttgcggaatcactcgcgtcatccgctgtttcgacacctcgaatcaacctggcggcacgctcttgtggcatttggaggatggaattggtctgaaggaaactgtagcttgtcaagacagtcgagtcgacaagggatgtttgcaggaatcgagttggaagcttttttgcctcgcctaggatgcagaccggataccacaaagtttgcagagagagagaaatcaccaatgcagtattgcttccaaaaaaaaaaaaaaaaaaaaaaaaaaaaaaaaaaaaaaaaaa

SEQ ID NO: 457 - DNA, 459 bp, Arabidopsis thaliana
agcaaaatattttattctttacttatttaaaaacatgtatacacacatgtcattattggatttttgaagcaaagttagaaataacaagattcaagtttcttagctctctctcgtgcactactctcagcctctgcattgccttccctggagtaacttttctccagcaaacgccacatgaaaggaatcccatctctggccttaatcctctctctgattacttctttggccgtggaggattggcctgtctttagcagcagctggcaccacatttcgttgaaaacatctatttgttcgtctgatgccccaacgatcttgtaaccaatggcgttgaactctgaacccagtagttctagagccttttcgtagttaccccttgcgtattcatacacagcttccccaagctgaatccctttctgcatcacttgttgcttcttcttgttcttctttgataatcggaac

SEQ ID NO: 458 - DNA, 459 bp, Arabidopsis thaliana
  misc_feature (1)...(459): n = A,T,C or G
ttgcacgtgcctaggtgcacgccggcgggcccgacctaccctatccaccaaagggtnnnnnaccatatccaaaggctcctcctccatatacaaaggctcatccaccatatccaaaggcgcctccaccatatccaaaggcaccaccaccatattctgcgtatccttcgtcgtagacaccgtagtagcctccgtcgttgacctcttctcgttatcgtcctgaccgtcttgaaagtgacggagacactagtcacggccctgagtaaaactgctaaaatcatcgatatatatgaatcattggtgaccgtctataaacccaagaattaacatatactaattagtacccttcaaaaactgattagaaacataacacattcctttctagtgtattcgttatcttttatttttaactttctcttctaagaaacccaaaatctgaaaaaaacggtgaagtttgaaatt

SEQ ID NO: 459 - DNA, 459 bp, Arabidopsis thaliana
aagcttgatatcgaattcgcggccgctataaacattgaggctatatgaaacactactttccactatcagtcacccccaaaagaaaaccaaaatagagaacgagattcatattatacacacaataaaaccatataatatacatatgattaacaaatacttggaatgaataatttggattgttctgacaaatccatcaaagcctcctccactaactcctccagcaacttcaattctaattcctctcccatggaatccatttccaatctcaaactctcctgtgaaccaatctcagctacttcaatcctcaccactttattcaccgccaaactgctcaagtctccgtcttcatcccaccaccgatcttccactcttccgttacccgttaaacactcttgcattctgtttatcacataaacccccaatggcttaccagagaggatcatgggactactacgaggt

SEQ ID NO: 460 - DNA, 459 bp, Arabidopsis thaliana
cctctagagcggccgccctttttttttttttttttttttttgaagttaaaaagattgatcttcttcagaaagcctctctagagagaaagagagagattataaagaataattgaagtttccgttctaacatcagctaatgtctaaaaagcgactttgatactaattaattccacactagttagtcttctacatatatgtgtacacatactttccttggctcatccacctgttgaacctccattccaagaaaaagatctaaacaggacttaggcctcttatgatgatgaaccaccaaaacggatctcaacatccggaacttacaggtccggttccagatagattgaaacattgcctatatctaccacatacacattggctccacttttgactataccggaataataaatccatatttccggttcacattctccctggctgggctcacgaggttttcttttt

SEQ ID NO: 461 - DNA, 459 bp, Arabidopsis thaliana
  misc_feature (1)...(459): n = A,T,C or G
gtcgaatccaaatctctctctccggcgatctcatccatggcggaaggcggcgaagattcccagcggttgaagaaaattgcggcggctgccttcgactacgaaaacgacgctcgatgggccgattactggtccaatatcctcatccctcctcacatggcttctcgtcccgaggtcgtcgaccatttcaagcgcaaattctaccaacgctacatcgatcctgatcttgttgtggagcctatgtcgacttcatcttcgtcttcacaatctgccaggccaactgctacatctgcatcttcaactgcatcttctaatgcaaatgaacaagttcgttcacggaactcaggatcggttcctcgaacctctgggccatctgctacgactnntgcaaccccaagttcaatgcgctgggatgagcagacgattcagttttcagtcaatgcttgggtttttgttatagct

SEQ ID NO: 462 - DNA, 459 bp, Arabidopsis thaliana
  misc_feature (1)...(459): n = A,T,C or G
ccacgcgtccgctcggcgctgctactcaggtcttcgccggacacatcagcaccatcgctctcgcagcggtctccgttgaaaactcggtcatcgctggattctcatttggtgtcatgcttggaatgggaagcgcgttagaaacgctatgtggacaagcgtttggagcagggaaattgtcaatgcttggcgtttacttgcaacgatcatgggtgatactaaacgtgaccgcggttattctctcgcttctttacatcttcgccnntccaatcctcgcgttcatcggtcaaacgccggcgatctctagcgccacgggaatattttccatctacatgatccctcagatctttgcttacgctgttaattacccaacggctaagttcttgcaatcacaaagcaaaatcatggtgatggctgcgatatcagcggttgcacttgttctacacgtgctcctcacgtggt

SEQ ID NO: 463 - DNA, 459 bp, Arabidopsis thaliana
aaacttcaccaactacggcacgattcaccccggcggtgctgactcgttcaagaaatattcacaaaacggtaacgcagtaaccgactctttccggcgatacagccgagacgccgccggtcacgaagataaattcacaggctacgctgataacagcaacgtcgtcgaggaaaaattcaattcttacggcacatcagccaccggcggctccggcgattttaaaaactatcaatccggtgttaacaatccgacgactcgtttcaaggcgtattccgacgaaggaaatggccgtgctcagacgtttaaaacctatactcacgaagccaactccggaccgggtcaatctttcaccagttacggcaaaaacggtaacggagctccaaacgagttctcttcttacggtgtctcctctaacgtaatcggatctgatttctcaaactacggtgaaaacggtaacgcagc

SEQ ID NO: 464 - DNA, 459 bp, Arabidopsis thaliana
taacgatatattcctcaaaagagtatgttctaaaatgcggttagcataaccgggtcgccctagtcttcttaggtctcatacgattatggacccacgagatatatataacaggatttcggatgtacaaaagaaaaaaatcaaagatataactataataataaattataatccctttttgagataaaatgatttaaagaaaaaaaacagaggaatcaattttggtgtttaacttttaccggattgtgtgtttgggttttgtttttataacttctactgtcccgtcttgagccgttttggtttccgagtttgcttgacattgtcgtttctggttcgagaaaccggttcacgaacttcatgatccttgaaggaagaagacgaggattgtttagcgagctcgatttcaacggagatgcttgctttcgttaagtccactcctgaattctccaatgcttctctcag

SEQ ID NO: 465 - DNA, 459 bp, Arabidopsis thaliana
caaagatcatcaatggtggagggcaaaaccctgtcttcgacgatacccttcagttcgacgttaagaacctggattgttcgcttaagtgtgagatatttatgatgagccgcgtgaagaattatcttgaggatcagttacttggattctctcttgtacctttgtctgaagtgattgtgaggaatgggaaattggagaaagagttctccctttcttcaaccgatttgtatcactctcctgcaggttttgtcgagttgtctctctcgtacgcaggagattcgcctgacgtgatgcatattcctgcggttccaactgcggatgagaccgagttggctcctatcgagtttgatgagagtgagtttttggatccaaagattgtctgtgaaaacaatcaaatggtgtctaagtacttctccactacgtgttctgattctgatgattttgcaagctctgaaactggct

SEQ ID NO: 466 - DNA, 458 bp, Arabidopsis thaliana
  misc_feature (1)...(458): n = A,T,C or G
ttttttttacttgaaaagagaacccattttgcatttatcatgagttattatttccatgtcaaagtatagaagacctaacgcagtaatgtctgttgcaatacaatgaataaataaaagagcttatcctttgcctaacctacataatgaacgtggacgacacaaaagagaaagtattatttcgagcagcttctctcttcaccatcttatgtgcatacaacaagacgctccaacaaacatttggctggaaccaatctctctgcaaccttttccatagtcatgatgcgtttgtagttgatgaggatgcattactttccttcattctcctctcggctgctaatgctgcagcgactgagggtggtagatctctcagattctcctgtctctctcctggnnnttgttccatctctgctgtttctgctgttggtgaagcaaatagagattcaagatcttttagtgtc

SEQ ID NO: 467 - DNA, 458 bp, Arabidopsis thaliana
gattggaactgaggcaaagctgatgccctgtacgcacaagtttcatagtgactgcttgttaccatggcttgagcttcacagttcatgcccggtttgcagatatcagttacctgcagatgaagccaagactgattcagtaacaacaacgagcgataacaatggaagcagtagtgcttctgctacaaccagccatggagctgagaacagcgatggaaaccggcgccaagaagaagaagaagaagaagaagaggaggaggaggaggagaacgagaacaatgacggaagcggattctcgatcccgtggccgtttagcaccttgttctcctcgtcgcaagatagcaatgcaccaacggattctagttaagacatgttccctgagcaacataagctttttggtgtgatcatgaaatctcggttctacctaaatctgatcttttgtctgtacctcggccgcgacc

SEQ ID NO: 468 - DNA, 458 bp, Arabidopsis thaliana
  misc_feature (1)...(458): n = A,T,C or G
caacataaagccataaatggctgacaaaaagaaaaaatcgaacttgaagaaaaagaagtaacatagcagtgagtttcctttaagaagcttaaaatgattctaaggcatgaaaattttcatccacttatcgatttcctaaaaccaattcaacgacgcttgttgctgtgcctcnnnctcttcttctttcttctgcttctatcttcatcagaatctgagtccgaagctgattctgactcagatgactccgatgaagaagagctgtaccttcttcgcctttctttcctctgcttttgcttcttcttgctcttcttggcctttcttctcctcctcctttcgtcctctgagtccgacgatgaactgtattctgaactactctctccagatgagccatcactatctgtttcaaacacagaggcttcactatcactttcagaatcagactttgacctatgctttcg

SEQ ID NO: 469 - DNA, 458 bp, Arabidopsis thaliana
ccggagaatctcgtcatcgccgtaacccgatccggtggctactcggtttcggtttcttcgtacaaggattcagaggattcccatggcttggagccaatttcttcctcacagaacagctccgtgttaatccttcagttcttcagcttcttcaaaactcagccaatcttccaatggtcgctaaacccatctacggcgtcgtttcagactctgtctacttctttggccaacatcgaatcccatacatcgccgttggagctttgttacaagcaatctcatggctagctatagcattcttgtcaagatccaatgtatcaatcttagctttatcgatatatcttctccttagtaatctcggtgcttccttagtagaagtagcgaatgatgctattgttgctgaatccggaaagcaaaaaacctcagagacgcaatccggtgagctaccgtcatttgtttggatg

SEQ ID NO: 470 - DNA, 458 bp, Arabidopsis thaliana
  misc_feature (1)...(458): n = A,T,C or G
aactttttgaagtttttgcttcgggcaagcccgttcaattcacggctgagtctcttgcaccggagtttaacaatgctattccctctagcctaacaagagagagcccttatctgacccatccaatcttcaacatgtaccacacggagcatgagttgcttaggtacatccacaagttacaaaataaagatctatcattgtgccacagcatgattccacttggatcttgtacgatgaaattgaatgccaccactgaaatgatgccagtcacatggccaagtttcaccaacatgcacccttttgctcctgttgaacaagcccaaggttatcaggaaatgtttacgaatttgggtgagctcttatgtacgatcactggattcgactctttctcattnnaacctaatgccggtgctgctggcgagtacgccgggctcatggttatccgtgcatatcatatgtca

SEQ ID NO: 471 - DNA, 458 bp, Arabidopsis thaliana
attatttactcgtggaaagagcctttgaatatgtccttagaccgcatgctttagaacacctggcctgctgtatcaagtcaaacaaaaaaaacatatcgtttgaatgggaatgcagcgaaggggactatcatcgtatgagcagtatgcttgcttctcacttcagacatagatggttacagcaaaagggaagatcgatagccgaggaaggggtcagtggggtaaggaagggcacagttggtctggagactattcatgaggacggtgaaatgtcaaatagttcaactcaggataaaaaatcagactcctcgaccatagagtgggctcaccagagaatgcccctacctccacactggtttctcagcgccatctcagcagtccacagtggtaaaacctcaacagggccaccagaatccacagagttgcttgaagttgcaaaagctggagttttctttcttgca

SEQ ID NO: 472 - DNA, 458 bp, Arabidopsis thaliana
ttttgtttgaaagaagctcctcgttgaaagagtatcactttgattacattcttcaccttctgcccaaactttactatataaaaaaacttctgactaaactcatttacataagggggaaagaaagaagaaatgaagcaaagaggagactgtgtttttcaccaaacttgaaaagagaagagaaataagcagatacaacactggagagtttttgttttcgcagatttgggggagttggttttgctagcagctggctttgtctgaacgagtttgaggaggaaaaactttgaattgtgtcctccacgtttgccttcaactacgaccttgtggctcgtgtaatggtacattatatataaaaaagtagttgtcttttgcaggatcccttttaagttccagattgattcaagaagcttagacccaattgtctcttgatatggtctggaatcaacttgttgaccagt

SEQ ID NO: 473 - DNA, 458 bp, Arabidopsis thaliana
  misc_feature (1)...(458): n = A,T,C or G
cgcgtccgaattatcctatggttcctgggcacgaggtagtaggtgaggtgttggaagtgggatcagatgtgagcaagttcaccgtaggagatgtagtcggagtcggcgtggtcgttggatgctgcggtagctgcaaaccatgcagctcagaacttgagcagtattgtaacaagagaatctggagttacaacgatgtctacaccgatggaaaacctactcaaggtggcttcgccgacaccatgatcgtcaatcaaaagtttgtggtgaagattccagaaggaatggcggtggagcaggctgcaccgctactctgcgcgggagtaacggtttatagtccgttgagccacttcggtctaatggcgagtgggcttaaaggagggattctagggttaggtggagtagngcacatgggtgtgaagatagctaaagcaatgggacaccatgtgactgtgataagc

SEQ ID NO: 474 - DNA, 458 bp, Arabidopsis thaliana
cctttttttttttttttttttttttttttttttttttttttttttttttttttttttttttttttttttttttttatcaaaaagaaaaatgattgtggatagaacccaaatataatcgaacatataaatgtgatgttttgggaaaattcaaagagcaaaattaaaataaagtccaaagaggaaaagactttgctaagctgcaaaaagaaaaagaaacattatttattctttcttcataaacttgctttgctgtgccacttgtgatcttttcacaccaattaaaggagtatcaagatgtgtcttccatgagagagggaagaagacttgaatttgttttattcagaggtcttctggaccattgatgttcttgttctcgaccacggccctgtccggaatttcaagcttcacaccggattttgccgccacagtcaccttgcccttgagaacaatggaagagc

SEQ ID NO: 475 - DNA, 458 bp, Arabidopsis thaliana
ctgggtcttccggtggcggcgacggtgaactgtgccgataacaccggtgctaagaatctctacatcatttccgtgaaaggtatcaaaggtcgtcttaatcgattaccttctgcttgcgtcggagacatggtgatggccaccgtcaaaaagggtaagcctgatctcaggaaaaaggttcttcctgccgtcatcgttaggcaacgcaaaccatggcgccgaaaggatggtgttttcatgtacttcgaagataatgctggagtcattgtcaaccccaagggagaaatgaaaggttctgcaattactggtcctattgggaaagagtgtgctgatctttggccaaggattgctagtgctgccaatgccattgtctaatgatcagatcaatcaattgcttgtatttgatggatatgtctagatacaaatttgagaattttggtagcaagatatttttattttct

SEQ ID NO: 476 - DNA, 458 bp, Arabidopsis thaliana
atccccagcttgacaatgcctcgctatgatgatcgctatgggaacactcgtctttacgttggccgattatcatcgagaactaggacccgagaccttgaacgtctttttagcagatacggaaggtctctgggattttgcctaacctggaggtgtttgatgagtgggtggacttggtggaaattctcgccaagtgtttaggggacagggcgccttggcgattctgtttgtagaattttttaatgtgttttgatggaaatggagactcagtctcaaaaatggtgtttagaagtaccttaaagtaatgatggccttacttttctgccaacaatttcttccgcagagtgcgagatgtggatatgaagcgagattatgctttcgttgaatttggtgatccccgtgatgctgatgatgcaagacattacctggacggacgagactttgatggaagtcgcatcact

SEQ ID NO: 477 - DNA, 458 bp, Arabidopsis thaliana
atataggttcaataacaacaatcacactgatacacatataaacattatcgttattcatatattataaggtgcatggagacgtagtagtaaactccaagcttccacataaggcccagcgttaacattttatggaagtgtgtatgctccacacttgtaaccgacgggacggttagcgaagttgcatcgtttagggatggtaagggcaacctcaggatcgacaccggaggctttggctgtatccgaaagaagaatggcgcagagacatttagggttttgagaaaatctcttaatctgagtacagcaacctcctggcacggcggagttagcgtcctgagctgcaccagcacatggagccagcttcatcgcctcattgtctggcgaagatctaccacactcccctgcaccgtcaacgactgttccgatgaggaggatcagaccaagaatgcagagaaatttca

SEQ ID NO: 478 - DNA, 458 bp, Arabidopsis thaliana
ctttttttttttttttttttttttttttttttttttttttttttttaataacttaattatacattaagtcaagtaaagagtttgcagaaactgaagtcttacagaaatctagagaaaaacagtaagacagcaagagcagaccataatgttttcaaaatgaaactctaaacccagcaatccggcatacaccaaatcactatacccagcattgactacattacgatctcatctccgctgtggaccaaaacgattgcagaacctagaaacactaccgacgacctacgtagccaacctacgtagtacccttttatacatactgtttcagaacaaactatgcctttcggataaccctataagacattaaacactgttaggaaacgtctttataacccagagccctaacagtcctaactttcatatgatcattctccttgaagtggcttaaggctaacccctaa

SEQ ID NO: 479 - DNA, 458 bp, Arabidopsis thaliana
ttctccctataaatcaaacttttctttgccataatgcttcagttcctgttattatcaatgataatgatacaaatcggatcctagatgtagaaataaatataagagtgcatacctatattttttttattaaaaaaaatatatgattgcggatagaatacataaataattaaccgaatttgcccgatgtggaggcaatcaagaaagccgcataagtgaatatataacctacagaaaagtgagctaatccaaccaatcttgcttgcacgattgaaagagctactggtttatctttccagcgaatcaaatttgccaaaggtgtgcgttcatgagcccacgctaaagtttcaatcaattcctgccaataaccacgccaggaaattaagaacataaatcctgtagcccaaacaagatgcccaaataagaacatccatgcccagactgataaactattcatacca

SEQ ID NO: 480 - DNA, 458 bp, Arabidopsis thaliana
  misc_feature (1)...(458): n = A,T,C or G
cttattaagttacgataggatagaaattttatttatgcaacggtgccaaaacggctacaaagataaacgaaacgacatagatatgaagtggatacaaggggaaaatgccatgaagataaatgcttaagaaggtacgtagnagagtggatttgggagcttaaaaaccctcccaggggtatcctcaaccaaatcagcccattggtctccgatattgccaacgatgttgtatcctttcttaacgagactcttcctcacctttgacttgtacaccacttgcctcaagttcgnnncattaggcttcaatatgagatgcttccagtaggccacgccagcagcttcgagattgtcgagagtgacattcttccacaatttccaacggtcactgagtatgatgggttcaatcccgagctctatgatgttttggtaaagatgcaaggcctccgggagtccaggggttg

SEQ ID NO: 481 - DNA, 458 bp, Arabidopsis thaliana
gcggccgcgttttgatgaccagagttgattgtgcgataaagatgaatgtaaagctttgtgacaagttctctatcaatcattatccaatgctcttttgggctcctcctaaaaggttcgttggtggcagctggggacctaaacaagagaaaaatgagataagcgtagtcaatgaatggcgcactgctgatcttttgttgaactggatcaacaagcagataggcagctcttacggcttagatgatcagaaattaggaaatcttctgtcaaatatatctgaccaggaacagatttctcaggccatatttgacattgaggaggcaactgaagaagcttttgatatcattttggcacataaggtttctgcagcttttagtggcacatcatccatcaagaaggtgccgtaccggaagtgctgaaattcttgtgaattttgatgatatatgcccgtcaggcgaatg

SEQ ID NO: 482 - DNA, 458 bp, Arabidopsis thaliana
tctcactacagatcagtatcatctctaccgtccgttgaccgatcattccttctcatccaacgactcaggatccacggcagctcttcttccttccctgaatcttctccttctgcgtctattctctccggcgcagatccgttgaagtgtacggtctctggtggatctcttgctaaatggatcaccgggatttcagctggatccgccttagggtttctctattggtcctctggttcttctgattccatctctggtttgtttggtgggagtaatttattgtccttcgctgatagttcaacgccttctgtttgtggtgtaaaagtcggcgatctgaaaccgagatcgtttattccgaaattgtcgttgcctggttacagctctggattcatcttcggagatgcgtatagaaggaagatcttcttcaattacgagaaacgtttgagattacaaagtcctcctga

SEQ ID NO: 483 - DNA, 458 bp, Arabidopsis thaliana
cttttttttttttttttttttttaatatctcattattatcacattccacaaagctagttacaaggtcagtatatatgagtacatatgcgtatgtgaacaaaacaacaccaaaattatctcaaatatgaaatgctcaggatttggagaatgcacgaagcgtggcatccaacgcttcccgatcataatctccagtgaacacgcagtttcccagcgggcctttgagaagaatcagcctcagcagtccatctgccactttcttgtccaccgccattatggacttgaacatgctgacggtcatgctctctggcggagttgtaggcaatttcgcccgtactaggatcttgttcactctcttaacaatcgattcatcgatccaaccaagacgatatgacatgtccactgccattaccgtgccagctgcaacagcttctccatggagccactctccataaccaaag

SEQ ID NO: 484 - DNA, 458 bp, Arabidopsis thaliana
tttttttttttagaaatgaaaaaaccatttacaccacaatacttgttcaaatggagttctttctgaatacaaagctcaatagatcaaaagagaattaggcgtttgaattgaaactgaactcaattattatgtgacttcttctttgacaagaacataaaaaaccgggggaaagaaagcttcttctttttctttcgagacttggtctgtggggatagattggtttcagagttttcttctgttccatatgactcacttgggctggaggcataaacaacagcttcaggtgattgctccatctttcctccttcaaagctttcttttaggtttttctcagtgttgactccatcaccagcctttctcttttgttcatgttctgccctccatttcctcagctcctgctccacccccaacttcccttctttggccttctcagccttttcagttgcttcttttaatgc

SEQ ID NO: 485 - DNA, 458 bp, Arabidopsis thaliana
ttttttttttttttttttttttttaataagaattatttttttattatcgaaaagtgcaatcacaagggaaaaaaaacaaaccaaattggagagaaatcaaatcatgaaatgtgtcatcaaccgagtatggtcgtctcagcgatcatggaggtgacaacgtaaggatccatgttagaagctggccttctgtcttcgaagtaccctttaccttccttctctgtgtcacgtcccactctcactgacgctccacggttcgcgactccccaagagaatgtgttgatgtctgcggtttcgtgctttccagtgagacgacgctcgtttccttcaccgtaagcagcaatgtgttctttgtgtttcagctgaagcttccctatcgctttcttgatcacttctaatcctccatcgtttctcattgtcttagtgctgtagttgcagtgagctccagctccattccagtc

SEQ ID NO: 486 - DNA, 458 bp, Arabidopsis thaliana
  misc_feature (1)...(458): n = A,T,C or G
tctagagcggccgccctttttttttttttttggtttggaaaatttaagaacatgtttggttgaaaagagaaaagactcaagtggtcggatctgtccaaaagttttgtgacggtcacaagagggaaagataaaaaggaaacggatttgaaggaaacggctcagagagatttaagacactcgcagcatctctctacttctctctctctctgtttcaacccctcttgtcgtctatctccatcaaaaagaccaaaatcaaacatcattgaatgttagacagagaggcaaaaactaatcaaagtgtttctaatccctgaaaataagcccacttcttctattttcctcatttcagtttctgggttttaatcgatctccccctttctcacccttccgtctgaattccggtctnnnatcgtcggaaagttttggactttacaccaacgccaaagcgagttcttgtt

SEQ ID NO: 487 - DNA, 458 bp, Arabidopsis thaliana
ctagagcggccgcccttttttttttttttttttttttttaagaaatcaacaataatcgcttagcaattgtacagacattatccccaccacaacataaacattggtccctactccaaaaagttttaaaaaaacccattggtccaaaggaaatccacacataactttagtatacacatcgaatccatcttactactttaaccctccccataataaaaaaaaactaaaaggtaacgaaaaattgacataccagggacaacatgcatcctcttctttatctttttaattaattagattggatggattatatatataattttgaaaagatggattggattaacatcgtgatccttttctacaaaagagtgcaccagcattggacgtgactgaagccaccaatgaggacggtctagccgacaaactcgaagccttagcatagcttgaagaggctcctccacccg

SEQ ID NO: 488 - DNA, 458 bp, Arabidopsis thaliana
tttttttttttacaaaagataacaaaaactcacaatcttaatgtgtatttagaaaagacattaagcattccaacaaagattcttgctctgcgagccgaaaaacaaaatcaaaaccaaacaaattcacaatcaagtaaccacaacaagagttgtggattttactcaaattgataagcggatcattcattcttcaaacttcagaagctggcaaaaagtgaagttacgatccttggcttgtaattctgcaactctcttagcagcacctgaatcacgagggctccctcccacacgacgaagcgttctgatcttaggtagctccttaactataggagactcgtcaccgttctcaccactgctatacagatcaacttcacttggaatctcccatctcttcttcactctcccttcactcttgttactttcatcagaagctcttctcttctccgacctcttatgat

SEQ ID NO: 489 - DNA, 458 bp, Arabidopsis thaliana
  misc_feature (1)...(458): n = A,T,C or G
gcggccgccaaacacaagcaccaaacaggttatgtatcttggtctaaaacaaaaaggaacacatgatcccacaaacacncaaaaacacacacataagttctggctgcatgaagacaaactgcagtttcttatccgagtaacccacaaaagcaaacaagacaacccaaattcaccgattgtttgaacattcaaaccatgacccccacccttctaatcctcctctctgtgaccctcctctctgtgatcctcttctctgcgatcctcctctacttgacactcctctctgtgaccctcttctctgtgctactcctcttggtgaaactcgttgagatggtgcagatggtgcagatggtgcaggtggtgcaggtggttcagatggtgcagatggtgctctttgggactgttgggacagagacggttgggacagagctggctgagatggctgagatggctgagat

SEQ ID NO: 490 - DNA, 458 bp, Arabidopsis thaliana
gaggagacaagttagaaataccaaacaactttagacaagtatttccacttcgacttagagctcctctcaatcgtgccttttcttcctcatgcatcctcaacagcctaagaatctctcgcacacgagggaaaaatgcaccaggacgaacacaataaggtttaagcacagtaagaagtgcctctgcgtcaacttcaaacctatcaaacttttgtctccgtaaaacaggttctcctgagaaaaatttacgagaaacataatggtcaagcccttccgcgagatttctccacaagtccaagaagtctttcgggttcatgtttagatgaagaacacacagatgccttcttaaattgtccaatgcttctgcgacaccctgagacactgttaaattgctggagctggtaatgacgtcttcgtcccatgaaactgcattgttgtggaagtggtcgctgcaaagattg

SEQ ID NO: 491 - DNA, 458 bp, Arabidopsis thaliana
caccaccctactctcaaactcacgtggagcccgttaatggttatccttctgacaacaagagatgcgacgattcctctgttcctgccaaatatgatgatcttgtccgtaactctgctctcttctgggaaaagctccgagctttcctcggattaaccagcaagactttgaaggttcctactgtgggaggaaacactcttgatctgcatcggcttttcatcgaggttacgtctcgaggtggtatcgaaagggtggtgaaggatcggaaatggaaagaagtgattggtgcattcagttttccgacaacgataacaagtgcatcgtttgtcttgaggaagtattatctcaagtttctttttcagctggaacatgtgtattaccttgaaaaaccggtgtcttcactccaatcaacagatgaagcattgaagagccttgccaatgaatctccaaaccctgaggaa

SEQ ID NO: 492 - DNA, 458 bp, Arabidopsis thaliana
agctcttgaagcttgaggaactagatgcttgcagctggagaatatcgggtaaaatccctgatgatcttgagaagctttcgtgtttgatgaaactgaatctggggaataattattttcatagtcttccgtctagcctcgtaaagttatcaaatctccaagaactttcattacgtgactgccgagagctcaagcgtcttccccctcttccatgtaaactggagcagctaaacctagcaaactgtttctcattggagagtgtatccgacctttcagagttaacgatcttgacggatctcaatctcacaaactgtgcgaaagtggttgatattccaggcctagagcacttgacggctctgaaaagattatacatgaccggatgtaactccaactactcccttgcagtaaagaaaagactttccaaggcttctttgaagatgatgcggaatctgagcttgcct

SEQ ID NO: 493 - DNA, 458 bp, Arabidopsis thaliana
taagtcagattccttcctaatcccattctttcagtcttctctttcgcccttctgagttcaacaactgtgttatctctatgaacagttcctttgatgaagaacacaaagtgaaagttgctgtctttataaccaggatttggtaattcccattgtttcatgggcaattcttgccgtggatctttcaaggacaaactcgacgaaggcgataacaataagcctgaagattactctaaaacctctaccaccaacttgtcttctaattccgaccattcaccgaacgctgcagacatcattgctcaagaattctccaaagacaacaacagcaacaacaacagcaaagatccagctcttgttattcctttaagagaaccaatcatgaggcgtaacccagacaatcaagcttactatgttcttggtcataagacaccaaacattcgtgatatctatacccttagccg

SEQ ID NO: 494 - DNA, 458 bp, Arabidopsis thaliana
aattcaatcgaccgcagcttcagatcagtactgtgaatcccaatccagctcaatctcgattttcccgccctcgatccctccgtgttctctcactctccgccgatccatcggcaaatcggaatcctaaatcagccgttgacgcacacgcgccgccactggtggttgtgggatctgcgaacgccgatatctatgtggagatcgagagattacccaaggaaggggaaacgatttcggccaagacagggcaaacgctcgccggaggaaaaggcgcgaatcaggcggcgtgtggagcgaagctaatgtatccgacttacttcgttggtcgtttgggagaggacgcgcacgggaagctaatagctgaggcgttgggcgatgatgggtgtggggttcacttggactacgtgagatctgtgaataatgagccgacgggacacgcggtggtgatgcttcagtcggac

SEQ ID NO: 495 - DNA, 458 bp, Arabidopsis thaliana
  misc_feature (1)...(458): n = A,T,C or G
attctacctactccgattcaatcgatcttatcgagacatggatgctcgtaagagaggacgccctgaagctgctgcctctcacaactccaatggcggattcaagaggtctaagcaagagatggaatcaatttcaactgntttaggaagcaaatccaagccatgcactaaatttttcagcacttctggatgtccatttggtgacaattgccacttcttgcactatgtgcccggtgggtacaatgctgcagcgcagatgacaaatctccgaccaccggtttctcaagtttccagaaatatgcaaggatctggtggtcccggcggcagattctcagggagaggagatccaggatcaggccctgtttcaatctttggtgcttnnacttccaagatcannntagatgcttctttagccggtgccatcattggaaaaggtggaatccattccaaacagatatgcc

SEQ ID NO: 496 - DNA, 458 bp, Arabidopsis thaliana
  misc_feature (1)...(458): n = A,T,C or G
ctcaacaaaaccaaatcatccaaattgggtaaaacaaaagaaactaacaagaagaagatcgaattcaagaagaagagatggagaatggagcaacgacgacgagcacaattaccatcaaagggattctgagtttgctaatggaaagcatcacaacagaggaagatgaaggaggaaagagagtaatatctctgggaatgggagacccaacactctactcgtgttttcgtacaacacaagnnnctcttcaagctgtttctgattctcttctctccaacaagttccatggttactctcctaccgtcggtcttccccaagctcgaagggcaatagcagagtatctatcgcgtgatcttccatacaaactttcacaggatgatgtgtttatcacatcgggttgcacgcaagcgatcgatgtagcattgtcgatgttagctcgtcccagggctaatatacttctt

SEQ ID NO: 497 - DNA, 458 bp, Arabidopsis thaliana
ggaccgataatgttgaaccagagttcgctgatctccttgaagctagtcgacttgctaaagaagttaaacacccttttagaaaccttcttcaacgtagaaaccgtcctcagctcgtcatcgccgtcgctttacagattttccagcaatgtactggaatcaacgcgattatgttctacgcgcctgttctgttcagcacattagggtttggtagtgacgcttcactttactcagcagtggtgaccggagcagtcaacgtcctctcaactttagtctcaatctactccgttgacaaagtcggtcgccgagttcttctcctagaagctggtgtccaaatgttcttctctcaagtcgtaatcgccattatccttggcgtcaaagtaacagacacttctacaaatctctccaaaggtttcgcaattctagtcgtggtaatgatctgcacatacgtcgctgctttc

SEQ ID NO: 498 - DNA, 457 bp, Arabidopsis thaliana
ttttttttttttgttttttttttgatcctcaaagctgagaaaagttgtcattattcaatcaaaagattaacaggcttagaattccattttaagccttacagaatcaaatacacgaaaccagaaactgaaacaacacacaacaaaagcttgaaggtaaaaatgcaacattgcatcaagttcttattcataaaacaaagaagataaaaggaaagaccttttttttagcccacactattcattcattaacaggtgatgatgatcgagagtgttccttagatcccaaaagatgtttacttggtttcagagaagaaacaagataatatctttaagaacgataatctggaacaatcccaaagacatcacaatcaaattccttgtcatttcttggtgaacataatccgccaaaatctcttccattccttcatgtatgtgaaagactacagggattttgcgtaag

SEQ ID NO: 499 - DNA, 457 bp, Arabidopsis thaliana
tcgagcggccgcccgggcaggtagcaaattgaattagaggaagctcgtaaagccgggcttgctccagctgaggttgatgaggatggaaaggaaattaatcctcatattccgcagtatatgtcatctgctccatggtatcttaattctgaaaaaccgagtttgaagcatcaaaggaaatggaagagtgatcccaattacactaagtcgtggtatgatagaggtgcaaagatctttcaagctgaaaaataccgcaagggagcgtgtcaaaactgtggtgcaatgacgcatactgctaaagcttgtatggataggcctcgtaagattggggcgaagtacacaaacatgaacattgcacctgatgagaaaattgaaagttttgaacttgactacgatggcaagagggacagatggaatggttatgatccttcgacctaccatcgtgtgatagatctttatg

SEQ ID NO: 500 - DNA, 457 bp, Arabidopsis thaliana
  misc_feature (1)...(457): n = A,T,C or G
gagcggccgcccgggcaggtaagaaagctcagttagctattttctctaccacagaagaatctagacccnnngagagagagagagagagagagatcagtaacgagagagtcaaagagaggagatttcagtgaagatgaaggagatgcaggcaatagagacgtcgcagccgacgacggtggctccggcggtgcatagccgacaattgggagctcagttgtcgggaagtatgagtttcagcagcnnnatgtcgaaggaagatgaggagatgtctagaactgcgttatctgcgtttagagcgaaagaagaagagatcgagaagaagaagatggagattagggaaagggttcaagctcagcttggtcgtgtcgaagaagagactaagcgtcttgctttgatccgtgaggaacttgaaggattagctgatcccatgaggaaagaagttgctatggttaggaag

SEQ ID NO: 501 - DNA, 457 bp, Arabidopsis thaliana
ggtaacggcatcagaagatttttattccttcgattatggggttaccatttaggtcaagccaaaacaggtcagctttaaagatgggggtccattaactaggagtacccttcaagcctttgtttccttaaagaaatttctgattcgtatgttgactgaagagatctggtgcaaagtggcagtgggaggtaggtctatcctctttggacacttacccatctctttaaaacccggttatcccaagttttatgtcagtcccaaaccttgtttgatggtgtttgccttgcttttacgataggttggtcatatccggttgaaactggatagatttcccaagattgaaggactgaagtgaacactcaatgtgctaagcttttatttctctatgaaagctccatcaaccaagagggctgtttttagttgtttaacagggtatttgtagatcttcttgttttggtga

SEQ ID NO: 502 - DNA, 457 bp, Arabidopsis thaliana
  misc_feature (1)...(457): n = A,T,C or G
ctttgccgaccggcgaaatctctttcgtttctgttcacgcgatcctttgcttcatctgctcctctcgccaaatctccggcgtcttctctgctcagccggtcccgtcctctggtcgccgctttttcctccgttttccgtggcggccttgtgtctgtcaaaggtctctcgacgcaggctacatcgtcttctctgaacgacccgaatcccaactggtcgaacaggccacctaaggagacgatcctgctcgatggttgcgatttcgagcactggcttgtcgtcgtggagccacctcagggtgagcctactagagatgaaatcattgatagctacatcaaaaccctagctcnnattgttggcagtgaagacgaagctaggatgaagatctactcggtttcaactaggtgctactatgcttttggggcacttgtgtcagaagatctttctcacaagttaaaag

SEQ ID NO: 503 - DNA, 457 bp, Arabidopsis thaliana
acaaggtcacgatctccatcgaaaagtaagcagcgagtcagtggattcgatatggcacctccagcctctgcaatgttagctgctggtgctgctgttacaggccaagttcctcccgctccaccaactcttcctggggctggaatgtttcccaacatgtttccattgccgactggacagtcatttgggggactctctatgatgccaattcaggctatgacacagcaggcaactaggcatgctcgcagagtctatgtcggtgggctttcccctacggcaaatgaacagtctgtggctacattttttagtcaagttatggctgctgttggtggaaacactgctggtccaggtgatgcagttgttaatgtctacataaaccacgagaagaagtttgcttttgtggagatgcgatctgttgaagaggcaagtaacgctatgtctttggatgggattatatttg

SEQ ID NO: 504 - DNA, 457 bp, Arabidopsis thaliana
  misc_feature (1)...(457): n = A,T,C or G
caaggaggagatcaggaggtggtggatttgcctccggggtttcggtttcaccctactgatgaagagataataactcactacctcaaagagaaggtcttcaacatccgatttaccgcggcagcgattggtcaagccgacctcaacaagaacgagccatgggatctaccaaagattgcaaagatgggggagaaggagttttactttttctgccagagggatcggaagtatccgaccgggatgaggacgaaccgtgcgaccgtgtctggttattggaaggcgaccgggaaggacaaggagatctttagaggcaaaggttgtcttgttgggatgaagaaaacacttgttntctatacaggaagagctcctaaaggtgaaaagaccaattgggttatgcatgaatatcgtcttgatggaaaatattcttatcataacctccccaaaaccgcaagggatgaat

SEQ ID NO: 505 - DNA, 457 bp, Arabidopsis thaliana
gggtttggatgtgtttttaaaggatggatagaggagaatggaactgcacctgtcaagcctggtactggtctaactgtagctgtcaaaacactgaacccagatggccttcaaggtcacaaggagtggctggctgaaattaacttccttggaaaccttgttcaccccagtctggttaaattagttggctactgcatggaagaagaccaaaggctgcttgtttacgagtttatgccacgaggaagtttggagaaccatcttttcagaaggaccttacctctcccttggtctgttcgaatgaaaattgcacttggtgcagctaaaggtctcgcttttcttcacgaagaagctgagaagccagtcatatatcgagatttcaaaacatctaatattttactggatggggaatataatgcaaagctctctgattttgggcttgcaaaagatgctccagacgaga

SEQ ID NO: 506 - DNA, 457 bp, Arabidopsis thaliana
ctctttgaaggttcctaactcgttaatcgtaactcacagtgactcgttcgagtcaaagtctctgtctttagctcaaaccatggctagtaacaaccctcacgacaacctttctgaccaaactccttctgatgatttcttcgagcaaatcctcggccttcctaacttctcagcctcttctgccgccggtttatctggagttgacggaggattaggtggtggagcaccgcctatgatgctgcagttgggttccggagaagaaggaagtcacatgggtggcttaggaggaagtggaccaactgggtttcacaatcagatgtttcctttggggttaagtcttgatcaagggaaaggacctgggtttcttagacctgaaggaggacatggaagtgggaaaagattctcagatgatgttgttgataatcgatgttcttctatgaaacctgttttccacgggcag

SEQ ID NO: 507 - DNA, 457 bp, Arabidopsis thaliana
tttttccagaggcaatcatggttaaaggtccaggactctacactgaaatcggcaaaaaggccagagatcttctgtacagggattaccaaggagaccagaaattcagtgtcaccacttactcttcaactggtgttgcgatcactacaacgggaacaaacaaaggaagcttgtttttgggtgatgttgctacccaagtgaagaacaagaacttcactgctgatgtcaaagtttccactgattcttctcttttgaccactcttacctttgatgagcctgcccctggactgaaagttattgttcaggctaagttgcccgatcacaaatctggaaaggctgaggttcagtatttccatgactatgctggtatctctaccagcgttggattcacagctaccccgattgtcaacttctccggtgtggttggaaccaatggtttgtctcttggtactgatgtggc

SEQ ID NO: 508 - DNA, 457 bp, Arabidopsis thaliana
  misc_feature (1)...(457): n = A,T,C or G
tttttttttttttttttttttttttttttttcagatcaacgataccaactttatttaataaaaataaaacatattgcaaccatatatttaaaaaagaaaaagaaatgtcccttgagtggttttgtagtgcgtaggtaaaagaaccaaaactctacgaaaaatatggcttcgttgagagaacacatcaaacaacctcaacctcattcttcgtagactttgactttatctcccacttcaccccactttctctttgtttttggtatctctctgcctaaccccaaaagtaaacggccgttatcacgctttcgaaacggatacggcctctttaacggcgatagaagacgacctctcggtcacgccgttaccgtttaatttcccattaccnnnacccatttttgtactcgtcgactgtatggtcatggcagaaagattgggaggggaaggacctccggcgtcg

SEQ ID NO: 509 - DNA, 457 bp, Arabidopsis thaliana
ttaacttgcaagagagagctcaaagatggaaccaacagaaaaaccatcgaccaaaccatcttctcggactctacctagagacactcgtggctctctcgaagtattcaacccgtcaactcagctgacccgacccgataacccggtgttccgtcctgaaccaccagcgtggcaaaacttgagtgatccacgtggcaccagtcctcaaccccgaccacaacaagaaccagctccatccaaccctgttcggtctgatcaagaaatcgctgtcacgacctcatggatggctctgaaagacccatcaccggagacaatctccaagaagacgatcaccgccgagaaaccacagaagtcggcggtggcggctgagcagagagcggcagagtggggattggttttgaagaccgatacaaagacgggaaagccacaaggagtaggcgtgaggaactctggtggaact

SEQ ID NO: 510 - DNA, 457 bp, Arabidopsis thaliana
gaaagatgagaggcagcatcgcaacaccaacggtaccgaaagctaagaagatgcgtaaaccgaaagaggagagagatgttactaacaacaatgttcagcagcagcagcagaagcagcgtgtgaaaccggttaagaagagtgttgatcttgtgattaacggtgtgagtatggacatttctggtttacctgtaccggtttgcacttgtactggaactcctcaacaatgttaccggtggggttgcggcggatggcaatccgcttgttgcacgactaacatttcggtgtatccattaccgatgagtactaagcgacgcggtgcaaggatttcgggtaggaagatgagtcaaggcgcgtttaagaaggttcttgagaagttatcaacagaaggttatagctttgggaatgctattgatttgaagtctcattgggctagacatggaaccaataagtttgtcac

SEQ ID NO: 511 - DNA, 457 bp, Arabidopsis thaliana
ggatcctctagagcggccgcccttttttttttttttttttagacacaaaaacaaactttgatgcaacaaagattcgacatgaatacaaatcacgagattaataaaacacaaactatatcacttcttataatgtctttttagtttaagagttgatctgatacttctcctccccactctcttatcctaccctcagccattgcagcctctgtgtcccaatttgttctacagatcatccatgttaagactattgtctgaaccacggttcctgtcaacattccgcaccagattcccattacaccaaagttaagcttgtagcctagtaacagaccaaatgggattccaaacacgtaataacatactatgttaacgtatgccacaactgcttgccatccagctcccacagccacccctgataagacaggttggacattgttgatgacaatagagactgcgagta

SEQ ID NO: 512 - DNA, 457 bp, Arabidopsis thaliana
  misc_feature (1)...(457): n = A,T,C or G
aagaaacacttgtacgacaatagtttcctgactaagttagtaaacagcatcgtttcatttgaactatgaagtaacaacagaagaaactaaagcagctaagagttgtggaattgcatctcctgttgttgaatcctgtcaatagcatcctctgctccagcttcaagatcagacatttcgtcttcttcatcttcttgtttgtagtatatgatgttagaagagtgaccagtggtcttggaacggtgaagagtggttgcagaggaagaggaagagaggctgaaactctctgaaacaccaagtgtcttgctcgggngcttcctcgctttacctttcttcaatttgatgtctttgtgccacttcttcaatgcctttgccatttgctcatcaaacactgctttcttcatgtgtgaacccatctgagtaacgagggcgtacaatgggagagtgatgtagctgcata

SEQ ID NO: 513 - DNA, 457 bp, Arabidopsis thaliana
gcggccgcgattcgatgaagatcaagagttatagaggatcgttagagtgatcaaaatcccacgaattcacaaaggatccgtcttcatagatccgtcagatctgttcagcggaggtacatacttcttcgtcattcactgctttctggattagttggtgagaataaacggctggtgggtctcggtgggaagctgaattggatgtagagttcatcagactatagcttagagaagaaaatgaagttttttgaatcgttttgctccagttgaggtttggaagctgcataccagctcatggaagagatttcacctgcagttgcacttactttgggtttagctaatacgatgtgtgactctggaatctcatctactttcgatatctccgagctggagaatgttactgatgcagctgacatgttgtgtaatcagaaaagacaaagatatagtaatggagtgtgga

SEQ ID NO: 514 - DNA, 457 bp, Arabidopsis thaliana
actaatattgtatggctctatctggaaaacaccgccattggagaagttccctgctgcattgaggatttcacgaggctccgtgtactactgatgtattgttgccagaggttgaaaaacatctccccaaacattttcagactgagaagtctaatgttcgccgactttacagactgtagaggtgtcatcaaggcgttgagtgatgcaactgtggtagcgacaatggaagatagcgtttcttgtgtaccattatctgaaaacattgaatatacatgtgaacgtttctggggtgagttgtatggtgatggtgattgggacttaggtactgaatattttagcttccgtaattgcttcaaattggatagagatgcgcgagagctcatcctacgatcatgcttcaagcctgtggccttaccaggtggagaaatccctaagtatttcacgtatcgagcttatggag

SEQ ID NO: 515 - DNA, 457 bp, Arabidopsis thaliana
ccacgcgtccgaggggagcgtcctcgaagggcctttgagcgtcgtagtggaactggcagagggagtgacttcaagcgtgacggatctggtcgtgggaattggggaactccaggggaagagatagctgctgagactgaagcagtagctggtgttgagactgagaaggatgttggagagaagccagctgttgatgatgtagctgctgatgctaacaaggagaatactgttgttgaggagaaagagcctgaggataaggaaatgactcttgatgagtatgagaaaatacttgaggagaagaaaaaggcacttcaatcattaaccacctctgagaggaaagttgatacgaaagtgtttgaatcaatgcaacaactgtcaaacaagaagtctaatgatgaaatcttcatcaagctgggttctgataaggacaaacgcaaagatgacaaagaagagaaggcta

SEQ ID NO: 516 - DNA, 457 bp, Arabidopsis thaliana
  misc_feature (1)...(457): n = A,T,C or G
cggccgcagatgaagaagcgaaagcttctctagacatatggaagtatgtctttgggtttgcagatatagcagctgcaaagtgtgccattgatcttaaaataccagaagccattgaaaaccatccttcttcacagcccgtaacactagccgaactctcctccgccgtctccgcctctccctcgcatctccgccgtataatgaggtttcttgtacaccaaggaatctttaaagaaatccccacaaaagatggtttagctacaggctacgttaatacgccactctctcgccgtttgatgatcacaagacgtgatggaaaatcgctggctccttttgttctcttcgaaacaactcccgagatgctcgctccatggttgagacttagctcanncgtttcttcgccggtcaacggttcaactccaccaccgtttgatgcagtgcacggtaaggacgtgtggtc

SEQ ID NO: 517 - DNA, 457 bp, Arabidopsis thaliana
  misc_feature (1)...(457): n = A,T,C or G
tggacctgtttgcccgccgtcgaacaaactaagccgggcaagtttccctgaaggttttttatttggcacggctactgcggcataccaggtcgaaggtgcgattaatgaaacttgtcgtggaccagnnttatgggacatctactgtagaagatatccagagaggtgcaataacgataacggcgatgtggccgttgatttcttccatcgttataaggaagatatccaactaatgaagaatctaaacacagacgcctttagaatgtctatcgcatggccaagaatatttcctcatgggagaaaggagaaaggagtgagtcaagctggtgtgcaattctaccacgacctcatcgacgagctcataaaaaatggtataactccattcgttactgtttttcactgggacactccacaagatttagaagatgaatatggcggctttttaagcgaaaggattgtg

SEQ ID NO: 518 - DNA, 457 bp, Arabidopsis thaliana
accagagagagagagagagagatcccttaataattcttacacatttatctttcttgtctgaatcctaacaaagactttagttttggtcgatcttataattttctttttttattctatggatttctcttccgggtttcaataattgtcacttccgtagtattctgcaaaggttttggttttttctccgagtttttttgtccttcaaaaaaaactttggttgctctctctctgttcaagaagatccgagcttgattcctaatctatcatttgagaagaagaaactaagaaatgggtaagagttggttttcagctgtgaagaaagcattaagcccagaaccaaaacaaaagaaagagcagaagccacataagtccaagaaatggtttggtaaatccaagaagctagatgttactaattctggtgcagcatattctcctcgtactgtcaaagacgcgaaac

SEQ ID NO: 519 - DNA, 457 bp, Arabidopsis thaliana
tgcttcatcactattgaaggcactcgcttcaaccgtcgctcttcttagctcactcagagatgtcgttctcgctgagaaagctactggttccgattctggttttggtactgtttctggatctgtgcgttgaatccggattctctcagtcaacgccggcgcgtgacgatcacgtgcatcatcacggtggtgggtgtagtcattctcatgaccacgaccacgaccacgatcatgatcatcatgtgaagaagacgacggcgaaggtggagatgaagttgccggaggagcttgctgaagaggaggatatgagattatgtgggtttgggccttgtcttcatgatcacgatcacgaatcaagttccactcttacggggtttgctctgtggcttaatgcattgggatgctctcttttagttagcttggcctcactcatctgccttgttttgcttcccattatgtt

SEQ ID NO: 520 - DNA, 457 bp, Arabidopsis thaliana
aaaatctagtcaaagaaatctacgaagccttaagagctagtcctcagtggaacgagattctcttcgttgttgtttatgatgaacacggtggttattatgaccacgtccctactccagtcattggtgtcccaaatcctgatggtctagttggacctgagccctataactttaagtttgaccggcttggtgttagggttcctgctttgctaatctcgccttggatcgaacctggaacggtgttacacgagccaaatggaccagagccaacgtcgcagttcgaacattcatcaattccggcaacactgaagaaaatattcaacctcaagagctttcttacaaagcgtgacgaatgggctggaacactcgatgctgtcatcaaccggaccagcccaaggacggactgccccgtcacattaccggaacttcctagggcaagagacatagacattggaacaca

SEQ ID NO: 521 - DNA, 457 bp, Arabidopsis thaliana
ctactgcttctgctggcaaaactgtaaattatgactctcacgacgagacagattcagtttcaagcgtcaaccctgacaacggcaaggacaaggatcatgggaagtatgacagtggttttggatttggatttgggtttgatgacttcagtattaagcctataaaaactggttcgaccatttcaaatgacttcctccctcctaagttatctatatttgctgattccgtcccaagcccaccggcaaatgcaagcgacgtttcccctacaaaaccttctttgtttgctgattcagttccgagcactccagcgacgaacaatgcctcttacccaggccagaaatcattttttgatgactcggtcccgagcactcctgcttatccaggcaacttgtttgctgagaagaaatccttctttgacgactctgtcccgagcacccctgcttatccaggcaacttgtt

SEQ ID NO: 522 - DNA, 456 bp, Arabidopsis thaliana
ttcagaaacacttctgtttacaatatcaattatcaaagctgcatcgtttatcctataactttagttgccattatccatcatagcaaccttaaaccagttgcattacaaattttgaattttgaggaaccaacttaaggaagcaaagataaaatttgagagacaaaaggaaagggtaagagacaacattggagtgcgatttttttagttcaactttagtttcagcgatacttcagaccatcggttgcgcctctggtccatgatcactaaagcatctcagagatgtggaaacgtgtcaatccacacgatgaaaactactctttgtatctcatcgtctctttctcgaacccaatcgttgggaattgcttagcatattcttctaccatctcacggagctttgacatctctgactgtaatttctcatttgattgcattgttgctacaaagtctttcaacttt

SEQ ID NO: 523 - DNA, 456 bp, Arabidopsis thaliana
tcgagcggccgcccgggcaggtcccaaacttgctcatcgtatcactggatacttagaagaagaggctgtaaattcttacactgaatttctcaaagacattgatgccggaaaattcgaaaactcgccagctccagccatcgcaatcgattactggcggttgcctaaagatgcaacgcttagggatgtggtttatgttatacgagctgacgaagctcaccaccgtgatattaaccactatgcttcggatatacaattcaaaggacatgaactcaaggaagctccggctcctattggatatcattaaagattatgtgacaaagtcacaaagctgtgtatacatctatgaacatatgttgttgtggatctccatgatatttttattttatgttttcgatttatttaaaactgttattcgtttttattagctcaatctggatatttaaaccatattatttt

SEQ ID NO: 524 - DNA, 456 bp, Arabidopsis thaliana
ttttttttaaagcataacttagtttgtgatttatacaaaaaagagatggatattatacaaactttgtatgttacagctaaagtttgaatgaggtttcctacagaaaaatacatacacgtatacacctatacttttttttatactagctgctgattcagacaaacaaaaagattcagcaaaaacatcagaagtttgggaaacagtatggttggtaaactggaatgtttgtctggagcatcaaccacaaatcctactcttgatcatgggccaaagttaacacagtcatacgtcgtatacagatagtcgtttttcaatgtctatacgacatattggacatgttgtacacttgtctgcacaggttctgcagagaacacggtgtctacatggaagcagtaccaaactgatatctttttcaaagcaaaccctacacagcactttctcattttgcagtctttc

SEQ ID NO: 525 - DNA, 456 bp, Arabidopsis thaliana
gacatcgacatcgccgtcgggaaagagccgctgataaaccatgaaaacaacaacaacacgaacaagatcttcaatcgctgcgtttcacaccaacaagacgagctacacagcttccgcaaatacctaaggtggatgtgtgtagatcactctagtccatggacagcgattctctcttggaccatgttcatcgtcttcacactcgtcgttccggcgatctctcacttcctcctcgcttgtgctgattgcgacagttaccattcaagaccttacgactccgtcgttcagctttctctaagcagcgtcgccaccgtctctttcctctgtctcaccagattcgttagcaagtatggtcttcgacgcttcctcttctttgataaactctgggacgagagcgaaaccgttcgacgaaattataccaatcaactcaatacttcgcttcatattgtgtcctacttt

SEQ ID NO: 526 - DNA, 456 bp, Arabidopsis thaliana
gcggccgcacttaaaccatatttctccgatcaaacatggcgtccgtatctccatctccgtcgtgttccactatacccataccacttcgacgaacatctttcgccgttgctgagttgagacgattaaaacaaagaagagcgatcccacctgtgtccgtcggtctcggacacttcgctgatgttgtacgcaatgacgttgatttcctgaagaacaaaatcggtatcggactccgttgggctaacgaggcttttcgtgtaccggaagtgactaaatccgctgaggaactgttttggcttaggcatcttgaggatcatacttctcagaatttgaagtcacaatcttggcctcagccttcctactcagggctcactggggtggatttgttcatggctgatgtcaaagccttggagacatatgctggttacttttacagtctttctaagatgtggtcaagac

SEQ ID NO: 527 - DNA, 456 bp, Arabidopsis thaliana
caaacgatttgcctcttcctaaagggtacaacaagaatggaagaagagtatgagagtcgtcgattgaggagatgggaagagttggacactgacatcttagtaagaattttccagaagtttagcgtctttgagttgacttcgggattagctcatgtttgtagaggatggagagctgcttgttgcgatccgattctttggaagacggtggatttgtcaaacatgagatctagtttcatcaagatcccattagagccttatgtctatgtggaacgccgatctgatgaggccctaacccgcatcctgaaactctccatgaaccttagcggaggaagcacgaggaccttgatttttcatttcaacttgttcttgagtgatgatcagcttacttacaccgcagaaaggtgtccagggttgagacgggtcgtcctaccggcttggaacagaataaagaagact

SEQ ID NO: 528 - DNA, 456 bp, Arabidopsis thaliana
tctcatcacaaattttgctatatccacaattcatgtgcttaggcatatagttattcccaagaaaccggtttaactgtttacgtatgcaacctccggcaagcgcaggacttttccggtcgccggaaaatctcccttggccttataattacatggattatttggtcgctggtttcttggttttgacggccggaatacttctccgtccatggctctggttacgtctacgaaactcgaaaacgaaagatggagatgaagaagaagataatgaggagaagaagaagggaatgattccaaacggaagcttaggctggccggtgatcggagaaaccctaaacttcatcgcttgtggttattcttctcggcctgttaccttcatggacaaacgaaagtctttatacgggaaagtgttcaaaacgaacataatagggacaccaatcataatatcaaccgatgcag

SEQ ID NO: 529 - DNA, 456 bp, Arabidopsis thaliana
  misc_feature (1)...(456): n = A,T,C or G
ttgtgatttcaccattagtctctatcaccaggggtttttggatgatcaattcacagaattgaaaaagctgcaagatgaatgtagtcctgattttgtggctgaggttgttactctcttctttgaagactgtgagaagcttatcagtaatatggctagagctttagatcagacaggaaatgtagatttcaaactggtaggttctagtgttcatcaactcaaaggtagtagctcaagtgttggtgccaagagagtcaaaggtctttgtgttaccctcaaggagtgttgcgactctcagaactatgaanngtgtgtgagatgtttgcagcaagtggatattgagtacaagacattaaaagcaaagcttcaagatctgttcaatcttgagcaacagattgtccaagctggtggtagaatccctcaagtggatatataaacaatagacctatcgacaacagg

SEQ ID NO: 530 - DNA, 456 bp, Arabidopsis thaliana
cggccgcgagagaaattcacagagaaacatgagaacaatgcaggaaaactcaaaaggaatatactttattcaacatacaagatgcatacccgagaaaaagatcaatgatgaaaatgctgctacaagataattagagagagacagaggtaggcttgtagtcaataaccaaaactttatccaagctgccaaggaagatggtggcgaattcaacgtgagcaggatgagcaatgtactctgcaacagcttctttactctcaaatgtggattcaaagatgtgtgtgtaaccttgatgcagattctcaatgctcacatcttttccccagtggaaagctttcataggttcgatgagattgacgagattggcgtaacctttgatgagctcttcgattttctcaggactaaccccatctttgaaactagcaagcaatacgtgcttcacaggtccctttgcttcct

SEQ ID NO: 531 - DNA, 456 bp, Arabidopsis thaliana
ctttttttttttttttgttaccaaatctctttttgtaaaattggagaaaatttgcaaatattttacaaatacaaaggggaaaactctaataatgacaacgtaagaatgtctagtttttggtgtgcaaaggaaggaagaaagatactacttgtctccgccaccgaacattcccatcatgtccttgccggaacccatctgcttcattagactctgcagaccgcccatgccgccaatctgcttgagcatctgaggtgggaggaccttgctcatgtgctgtgcgttcatgtttctcgagagtgcactcatatctccattctttgggatcttgagtcctttcatcttgctccatatcttcgctagcctcttgtactcttccaacatctccatcacttctcttacttgcctccctgaccctcttgctatccgcatcatccgtgactcgttaaacacctttgg

SEQ ID NO: 532 - DNA, 456 bp, Arabidopsis thaliana
gtgtaagaatcaatcctcttattccttttcaagatactttagaaaaaagacattccatcagagaaatatattggagacaaaaagaaaatcacaaacattgcatcaaatccaaaggatgctatagcctttctctctctcaacaagaaagaaaccatatgcatcaaatctaccttcgactaaaaatatttttaagaaagttattaaaccaaataaaacacaaccattttagagaaaaaaaaacgtttccttgttcaaatcaagcttttcttcacttggcactggcgagctgggagcggatgagcttagccgcatcaaccatgttcttgagtgcaggcttgacctcggtgtacttacgggtcttgagaccacagtcagggttaacccaaaggatgttctgctctaggacagcaagcatcttgttgaccctgtctgcgatttcctcagaagatggtattc

SEQ ID NO: 533 - DNA, 456 bp, Arabidopsis thaliana
gaatcacagcttagttacaaagatctttaatcaaagacccttttatctctctctgtcaaaccagagctcacgaatcattttttttctttctgttttccattattagttcaagaagaagatgtaagaacacaacaacaacaacaaggtcgctaacctcccttttatttctcatctcatctgttccatggagactagcgatttccgttactgatagttctcaatcaagcagcaactttcttcgacgtgactgagttcacaatggttgcaaactcaggacccttcaaggaggcaccaccaacaagaaatccatcaatgtcttcttctttggcaagctctgcactgttgcctccattgacagaacctccatatatgattctcgttttggaagcaacttcctcagagacattcttctttagccaaccgcggacagctacatggacttcttgtgcttgctga

SEQ ID NO: 534 - DNA, 456 bp, Arabidopsis thaliana
tagagcggccgccctttttttttttttttttttgcatttaaaattctttcaagtaatctcagctttcaaagtcacaaactcaaattgtagttttgacattggctcctctgtcgagtttggtccaaacaaaactagaaacaagccatacataggattaaaaatcgatgcacgacataaaaagagtaattggaatagtaaaagaccagaaaaaaacgattacaccttaatatatattctcagagagctaagattgcagagacccaaacggtacggaggctttttggaagacaagtcacactctccagaatcagcatagcctgaataacaaatcattcttccatgcgatctccagcgccggatcctttgacatcaacagagaacgagtactcttggtcacaccccaagtaagagtcacacatgaagtatagtgtgtatgacttctctcctggttcactc

SEQ ID NO: 535 - DNA, 456 bp, Arabidopsis thaliana
ggatcctctagagcggccgccctttttttttttttttttttttttagcgtttgaagacgctggtcaacgcgttttatacattaaaatttccaaaattcatcaacgtgttgaagcaagcttacacaactcagaagagctttgttagtaaaaaaaaggtgattcaagattcgtattcacagggaccgatcatcacaagagtgaccattgaccaataactttggttgaagttgagagtctacgcatgaaaaccgagctggacttagacgctcatggaactcgttgtgatcgttgttatggctgctagatatgttacactgcttcttccttctctgtacctcatccttgactttctgaagcatcatcaaatcgaactttggctgaccaatatgctctacagtgatggaaccaaagaggttccctaacaatgcagcatcaggaacagtcaaaccttcaaca

SEQ ID NO: 536 - DNA, 456 bp, Arabidopsis thaliana
ggatcctctagagcggccgccctttttttttttttttttttttttttttatactgaaacagtcacctcaatgtcaaatcttttacaaacagaccacaaagaacatatcaatgtcttgccaaacgagatcacagtgagcactgagcagagaacaaaagaaaaagaaaaaaaaaacagttggttctctgtatttacatcactagaaaccgatagttttgcctttaggaaagttatatccacgtattagtactccaatgatactgagaaaaccatgaatcaagtgaagggataaaagtttgagaagagcaaagtaccaagaaggatataggctgcacaatatgaccatatcaagtacccccatttactatgttttggagatccaatcaaagacgatgcaaaccagtaaagtggagggcttgctgacaagaaccttgttgcaacctggacatgcatgatg

SEQ ID NO: 537 - DNA, 456 bp, Arabidopsis thaliana
ttttttagtttagtgacaaaatccattttgtaacaatgtaaaactgaaatttctgaggtggtctacataagctttttaatgatctgaatgtttcaagaactaaattcatcaaaagaaagagagagattacatggagacgaagcgggctttgtacattgtgatgtacgccatatgccaatcacctcctccagatagctttgtgatgtcttcttcgcgttgcatgctcgggttgtcatcatcatattgaatccatttgccactctcttgcttgacccatgcaacataatgaccagagtctgcactcctgcccttgtgggtcaacacagcgaccaagtcatagattccagtcatgtgagtttccttctcagaagaagtaccttcctgtgggtttactgtggatgattctccacttccatttgcagacgcctctgcatcagtcattttcacatcactgtc

SEQ ID NO: 538 - DNA, 456 bp, Arabidopsis thaliana
  misc_feature (1)...(456): n = A,T,C or G
gcttgatatcgaattcgcggccgcaaaccaatcaatggaaactttcaagtgggctaacaaacacacaacagaaatacaactctcactcagttaagacacaactctcgtagttgggattgtaactaaattattatgagttccgtttcagagcaaccaaaagaagatattcagatcagaactggaattgcatctccggagagtatcccagagcttcaaggtttgcagccatggccttgttcattggcggtggtccgcatcttaggatctgaatatcagatgcaggtgcagggcaatgagtctgaatcatttcctttgatacaaatccaacaccaccatcccatacttccggangctggttcaaaacatagaagattttaaattgttcagggtaattggtagtaagannctccaattcttccttcaagagaatgtcgtcgtatgtgacgttggcgtaaa

SEQ ID NO: 539 - DNA, 456 bp, Arabidopsis thaliana
gcggccgcctctcacagagcagcaatggcggagaagtcgagcttcttcgttcatttcagctgtcttctgcttcttctaactatcataataacatgtggagagggagtgaggaatccggtgaggccaagatcatcggagagaagagcattgatggacggccaagatctctcgaggccattgaagctgacatttggtgggccttctcgtaattggactgacgctattcccatcggtaatggccgtctcggagccacgatctggggcggcgtctcctctgagattctcaacatcaatgaggacacaatttggactggagtaccagcagactacacgaaccagaaggcccctgaagcattagcagaagtgaggaggcttgttgatgaaagaaactatgctgaagctacttcagaagctgtcaaattatcaggccagccttctgatgtttaccagattgtg

SEQ ID NO: 540 - DNA, 456 bp, Arabidopsis thaliana
  misc_feature (1)...(456): n = A,T,C or G
gcggccgcccactaaaacccctatatttccatttctaccctttttgcatcatatacaaagcacattacatattcacatatttgcccaagtagtaggacaacaaaacctaacttaaggcctttctttttttgctaacacaagcaaaagaccatttcttttggtatacgaggaaagataagagacagaagaagcctctgtattagctaaaacctgtgtgtaatctcggttcttatcccattggagatcggtgaggaattccctttcttcgcttgacgattctgcagttactagatgtagtaagtggaggtgttgatgggctgaaactctggagatttgtaatgttcttcccaattgcaatgctgctacttgaatcctctgtttccattagcagnttctcccttcccttttcaaagcctcttgatgttccagcaatcttgcagccaagagagcagaagc

SEQ ID NO: 541 - DNA, 456 bp, Arabidopsis thaliana
tcgacggaactttcaaaatacatagcgtatcgaaatcggaatagtaactatgaaatcttgaaagcaaaaaaaaaaacaatttggaaatattcactgattattcattaaaggtagacttggaatggagatagattaggataagagagaagaagtagagagcaaaggccaagacacatatccaaaatggataagtcgatctcacataggccggtacacctattatgagaccaacgatcacaataatgagaacttctgttgaataatcccaagtcaatcctctgatgtacacaatcgccaatataattgttatccccagcagattgttcaatgtaacatctctataaatctcagaaaatgtgtcagatgtaatttttgctttctctttcttgcgacagaagtgagcagacaaagcgttctttaggtttcttgccaaagggatcactgcaaagacaacat

SEQ ID NO: 542 - DNA, 456 bp, Arabidopsis thaliana
agaaaaaaaaagaagcaaaaaacattgtgggtctccggtgattaggatcaaattagggcaccagccttatcggaggaagaagccatgggtagaaaaaaagtcgagatcaagcgaatcgagaacaaaagtagtcgacaagtcactttctccaaacgacgcaatggtctcatcgagaaagctcgacaactttcaattctctgtgaatcttccatcgctgttctcgtcgtctccggctccggaaaactctacaagtctgcctccggtgacaacatgtcaaagatcattgatcgttacgaaatacatcatgctgatgaacttgaagccttagatcttgcagaaaaaactcggaattatctgccactcaaagagttactagaaatagtccaaaggttagcacaaagacacttttatctccctcttcttctgatgaaaaatacttttttttttcttttcttt

SEQ ID NO: 543 - DNA, 456 bp, Arabidopsis thaliana
tctcgaaatcacccaaccacttaatctcaggtgctttagttgcagtggaatgcattgacgagaactcgaaaccgagtttcagacaagaagtgaaaacagacaagcgcggcgaattcaaagtgaagctaccattctctgtgagcaaacatgtgaagaagatcaagagatgctctgtgaagttgctaagtagctcacagccttactgttctatagcttcgtctgctacttcttcttctctcaaacgccttaaatcaaaccatcatggagagaatactagggttttctctgcagggttcttcactttcagacccgaaaaccaaccagagatttgtagccaaaaacctatcaatctccgcggttccaagcctcttttaccggatccttcatttcctccaccgctccaagatcctcctaatccttcccctctcccaaatctccctatcgttcctcctcttc

SEQ ID NO: 544 - DNA, 456 bp, Arabidopsis thaliana
aggagaactatctcctccttcatcttctttatcgtctcttctaccattctttttctcgccggaaaatcctcggccaaaatttctcataacggtgacaataatgtgacggccttgttcctctttggagactctttcttggatgcaggaaacaataattacattaacaccactacacttgaccaagccaattttccaccttatggtcaaacattctttggcctccccaccggaagattctccgacggtcgtctcatctccgatttcattgcggaatatgcgaatttgccgttaattccgccgtttttggaaccgggaaatagtcaaaagaagctttacggcgtcaactttgcgtctgctggtgctggtgctcttgtggaaacgttccaaggttcggttataaatttgagaacacaattggatcactacaagaaagtggagagattatggaggacaaac

SEQ ID NO: 545 - DNA, 455 bp, Arabidopsis thaliana
ttttttttttctaaaagggacttgttcgccaagacaaatgtataattagttattacagtcttgtcccgaattaattgtttaaatttcaaatcaggttacatcttcaaacaaagtattttcctccacaatcttagccatacttccatttacatgtacccaaatttctgctattttcttgattttcccatctaaaatctccaccaatgtgaaagctcttgttgtgccaccactctcagactctgctgctcctcttttctttgcctctttaacccttggaactattgcaccgttcacatacacagtctggttgtcactatcttgcactaccattttccgatttcctttcccccgttgcagctccttatgcatgtgcccaaacacaactaaaggaatcgacaacttagtcgtctccttcaactgtcgtatcgcctgctctagatctggatcaccatggt

SEQ ID NO: 546 - DNA, 455 bp, Arabidopsis thaliana
  misc_feature (1)...(455): n = A,T,C or G
tctgcaaaaatgtttattgagagcttcaaagttgagagcccgaacgtgaagtacacagagaatgagattcactctgtgtacgattacgagacgacggaggttgttcatgagaagaccgtcaatggcacttaccaatggattgtgaagccaaagactgtcaaatacgatttcaaaaccgatattcgtgtccccaaattaggggttatgcttgtgggtttgggaggaaacaatggatcaactctcaccgctggtgtgattgcgaacaaagaaggaatctcgtgggcaacgaaggacaaagtgcaacaagcgaattacttcgggtcactaactcaagcttcatcgattcgtgtcggatcttttaacggtgaagagatctatgctcctttcaagagtctcnttccaatggtgaatccggatgatgttgtgtttggaggatgggatataagtgacatgaa

SEQ ID NO: 547 - DNA, 455 bp, Arabidopsis thaliana
gtcagtggctgctgtgtttgtggctgcggaggcttggtaaaagctgtgggctgttgttgtaatccgcatgaatgctacgtggcatgatcaatggcagcaaaagagggctgtttaggatggttaggacaagtaggacctgggcatgaaatgtgactatgtatagaacgttggcagttgtggccaatttgtattgagccaacactgtgtgaacgacgctgcatgatccccacaaaatgtgagtttgtagagacccagcccttatgtacggccgtgtctacggcctcgttgacgtcccatgttgtgtcctatgaacactttgcaaaatccacagagcagcaacgtcaaaatgaagaccattttcaattgctgtcctgaccgacctgctagttcccctaatacccttcccattcttcccttcatgtagcgacccattcacactcctctcctccgcctaa

SEQ ID NO: 548 - DNA, 455 bp, Arabidopsis thaliana
ccacgcgtccgaaaacaaaaaaaaaaaacttacaccaaaacgatgtctggaggtgtcggtccaacgtacaacgacataaccttacccaagaagaagaagaagaacatcaaacccaatccacctcaacagtatcatccaccggaaaacccgccggattcttctcattccgacaactaaacatcctcgcaataatcatcgttctctccgcaagtggtctcgtaacaatccaagatttcatattcacgatcctcactctcatctacttcttcttcctctcgaaacttatcttcccaccacacaacaatccaaaccgtgacgctcctctcacaagctccacaaacaaaatcttccgtatctatgttacagcggcggggatcgtcgggcttatcattccgatctgttacatcttcgaaggaatcgttgaggatgataagaacggtgttagcgcagctgca

SEQ ID NO: 549 - DNA, 455 bp, Arabidopsis thaliana
ctctcgccgctctcaatatgcttcgatttctattctcctcttcctcttgattttgtcttcttctctttgctgcggagagattaaggaacccaagggttttaagcaagagacgcggcgaggaagctatccagaactctctgaaacatccattcctttttctcatggacgtagtgttgccggaaactgccgtggtaaccggtggttcggttatcggagattatggatttaatgtggatccttttctcgttgaggcgttgcacaactctcgccatcgtctcacgattttgcggatggaacttgatgttcaaaggttgttgcagaaccctgaacagcagcagtttgagttccagcattttcctacttcgtatcttcgtcttgcagcccatcgtgttgctaaccattatgggctagctacagctgtccaagagagtggtgctgatggaaatgaaaacaga

SEQ ID NO: 550 - DNA, 455 bp, Arabidopsis thaliana
gatggaggtttcagctgatggagaagggaatccagaagcttaatcttaaaccaggaggtgttacttctcttctccagatccacgatctcaaaaacgctcctggagtgtcaagaacagagatttgggtcggaatcaagaaagtaatcgagactttgcaggacaactatccggaattcgtgtccagaaacatattcatcaacgttccattctggttctacgccatgagagctgtcctctcgccattcttaactcaacgaaccaagagcaagtttgttgtggctcgtcccgctaaggtcagagagactcttctcaagtacattccagctgatgagctcccagttcagtacggtgggttcaaaacagtagacgataccgaattctccaacgaaactgtctctgaagttgttgttaagcctggatcatctgaaaccatcgaaatcccagctcctgagact

SEQ ID NO: 551 - DNA, 455 bp, Arabidopsis thaliana
cttggtctaaaagacccattactgcgccgtctctcttccgctgccgccgtaacaaactcttttctccaagccaacgatctcttcctctcaccatcacagaccctccgccttgaatccctaatctcatctctcccaatctcaccttccccttcttcctcctcctccgccatcaccaccaccacgtggttcaaccgcttcttaacctccgccacagaagacgaagatgatcctcgctggtgtctttatttccgaatgtcaaaatccaccttcttcagtctctactctatcctctcccattcttcgcttccttccttcgctgccacaatcttccgtctcgctcacggtgcttcttacgagtgtctcgttcacagattcgggtttgattccacttcccaagcttcacgctctttcttcactgtctgcaaactcatcaatgagaaattaagtcaacaact

SEQ ID NO: 552 - DNA, 455 bp, Arabidopsis thaliana
gaagagatttatttattacataaaaatggttgtcgccaatgatctctcgtccaagattctccccagagttctcatcgtctctcgtcggactctccgcaagaacaagtacgtggacttcgtaggagaataccatctcgatctcatcgtctcctccggtgccgtccctgtcattgtcccacgtgtcaatgggatccattctatgctccagagcttcgagcctattcatggtgtcctcctctgcgaaggagaagatgtcgatccttctctctacgcggacgatgaattatcagacctctcgccagaagacatggaggagattaagaaggcgcatgcagaggacatgaccatcgaccgagagaaagacagcattgagctgactctagctagactctgtctcgaaagaaacattcctttcttaggcatttgtcgtggctctcagattctcaacgttgccg

SEQ ID NO: 553 - DNA, 455 bp, Arabidopsis thaliana
aaaaaaatgtctgaagttgagtaccggtgctttgtcggcggccttgcctgggccaccaatgatgaagatcttcaaaggacgttctcacagttcggcgacgttatcgattctaaggtctgttacacgagagatcggtctcccggatcgagccgattccgatgattctgatcctcgacggatctgattccgatctgtttctctgttacttgattcgattactgttactatgttctctctcgttctttgttactgttacttaatttgtcccatcggtacgttcatcttcctgcttctatgagctcggagatcgatcgatttttgctttatattcatcgctttgttttatattccttccacgattgtttttgctgatgtgtatgattttgtttgtttacagatcattaacgaccgcgagagtggaagatcaaggggattcggattcgtcaccttcaagg

SEQ ID NO: 554 - DNA, 455 bp, Arabidopsis thaliana
gggacttttccgtttgcaattacgaattcgagctgtttcgattcgatttagaggccaaatgtcctccttctctgtatccaactcctcctattgaggtagatggagactcactagacaggctaatggcttcacaacatggaaatgcttatatgtctgtactcttttatgcttcctggtgcccattctcacgtgctgtgcgccctaagtttgatatgttgagttccatgtttcctcaaatacaacacctagctgtggagcattctcaagcactgccatctgtcttttctaggtatggtatccatagcttaccttcaatcctgatggtaaatcaaactttaaatgctcggtaccatggtcgaaaggatcttatatccctgattgagttttatgaagaggcaacaggcctccaacctgtccagtatgtggctgaaggggaaccaacaggcttaaatgcc

SEQ ID NO: 555 - DNA, 455 bp, Arabidopsis thaliana
gcacagacaaaaggttgcagaagttgaaaagtttacccagaccgtacgggagcttgaagaagctgttcttgctggtggtacagctgcaaatgcagtgagagattaccagaggaaatttcaagaaatgaatgaagagaggagaatccttgatcgggaactggctcgtgccaaagtaagtgcaagcagggttgcaactgtagtggcaaatgagtggaaagatggtagcgataaagtgatgcctgtgaagcaatggctcgaagaacgaagatttctgcagggagaaatgcaacaactacgtgacaaacttgccatagctgatcgagctgcaaaatctgaagctcagctaaaggagaaatttcaactgcggcttagagtcttagaagagagtttaagagggccttcaagcagtggaaaccgatcgacacctgagggaagaagtatgagcaacgggcctt

SEQ ID NO: 556 - DNA, 455 bp, Arabidopsis thaliana
aagaagaaagaagaactcaacatttcaagcaagaagaaagagagaagagagaaggtccaataatagagagaacaaaaaaaagagagcttaattgtcagtttattctctgcaaacgtgcggcctaagtaacacatgtcgaattatggagtgaaagaactcacatgggaaaatgggcaattaacagttcatggtctaggcgaagaagtcgaaccaaccatctctaataaccctatttggacacaaagtctcaccgggtgtgagactttggagtctgtggttcatcaagcggctctacagcagccaagcaagcttcagctgcagagtccgaatggtccaaaccacaattatgagagcaaggacggatcttgttcaagaaaacgcggttatcctcaagaaatggaccgatggttcgctgttcaagaggagagccatagagttggccacagcgtcactgc

SEQ ID NO: 557 - DNA, 455 bp, Arabidopsis thaliana
gacccaaaatatgaaagctggatgagaagtatggaggaaacatacagagacaaattccgtggttgggttgggttcaatgtccccatctctcatcgaatcacagccgggtaaaaacaaatcattctagcttagactttcaaaaattccagaagacatgataaaatcaatagagaatctttgctttgtccagggagatctattctatggattatcatatgattcatataaaggaactgttgtagaaaaccttcacagtgccacaaatatctcattggattgtttttgtttgtttgtcttgaaaactatcgataaacagctgtgacattcttctcatgccgtcgagattcgagccctgtggtttaaatcagctatacgcaatgagatacggaaccattccagttgttcatggcactggaggactcagagatacggttgagaatttcaacccttatgca

SEQ ID NO: 558 - DNA, 455 bp, Arabidopsis thaliana
cgatcatattccactttattaacataaaatttattcaaacaaggaaaaaattacaaatggaataataccgtttttggatcggaactcacaaaagggaatggttttgttcatgttgtcggaatctaaaaaaaaagctacaaattgggaacaaattacaaagaaacatgggagtgtacaatgcgtgaagggttgttgttgttattctctcatcatcagttttatgaaaccgaaagaaaaaaaggattttgttttgttttgtctgtcctcggttgtcacttgttgtcgtcccatccagattccgagcagacaagagaaaaagggcaaatttttatgtttttttttgttggttctcatcaggtaaagaatttacatgtaatcattgacgccggagctaccggagccgactccaacagttctcttgctcatgttagctctctgcaccaatacaaccaatg

SEQ ID NO: 559 - DNA, 455 bp, Arabidopsis thaliana
  misc_feature (1)...(455): n = A,T,C or G
tcgagcggccgcccgggcaggtcttgtctctccattaattagaggtttcacgatcttcttcctccaatctttttccagtcattatggctgagtctgcaagcaacaccgcttcaaaaaagctcattcaaatcgacgtaagctcggattcggtgtgtccatggtgctttgtaggaaagaagaatcttgacaaagctattgaagcatctaaagatcaatacaacttcgagattcgatggcgtccgtttttccttgatccatctgcacctaaagaaggtgtgagtaagaaagagttttatctacagaaatatggaaacagatatcaaggaatgtttgcaagaatgtccganntntttaaaggtcttggcttnnngtttgacacagctggtctcacaggaaacagtctggatagtcatagacttatacattataccggtaaacaagcgccggagaagcaa

SEQ ID NO: 560 - DNA, 455 bp, Arabidopsis thaliana
agatcttatgaaggtcgatggtttaactaatgacgaagttaaaagtcatttacagaaatatagattgcatacaagaagaccagctactccggtagtaaggaccggtggtgaaaatccacaacaacggcagtttatggtgatggaaggcatttgggtaccttcacacgatacaactaataatagagtttacgctcctgtggcgacacaaccgccgcaatcttcaacgtcgggagagagaagcaatcggggttgcaaatctcccgcaacatcttctactactacacacacaccacaccttcttcctctttcataaatatatagttaccgatttgtatgaaaatttgttttcttctttatatatttgttttgtaaccaagaatgttcgttctaggtttaagagttttgaataaattgtaacaatagatatacattgcacacaattgaataaaagaaaa

SEQ ID NO: 561 - DNA, 455 bp, Arabidopsis thaliana
ttttttttttttgagtgaatatcatcttcttaacgcaaagaaaataagatcacttttaggtaagcaaacacaacaccacatagctacaacaacttataattatacaaaaacaaaaaaagcttataattaaacatattgttgatgtatgcatgtatatgtactagatagatatttaccgaaaatatcataatagtaacataaccaaagttactattaaccacaagctgaaaaaactcagctctagttaaagtcaaaagctaacgctagaaagccaaacataattaccgactacactgttcttcttcctgctttgctttcagaatccagctttggacggttcacaaacgcggacgcagccaccaccaccgcggtagtagttaaacgccgttcttttgactcactacaaagagcttctaaaacgagaatctcgggctttcaccttccatggtggatat

SEQ ID NO: 562 - DNA, 455 bp, Arabidopsis thaliana
ctatcaacaagtccaacacacaaacttaatggcttccgcttgcgttaaaagtgccggtgtttcgccggagaagttctcgtcgtacggatggacgagccctcggatgtctttaaccagagacgacaacagacgctcttcctccgttgacaagcaacaatctgacccattaccggaaatccaagatccagttgtggatttcgagttttgccttgaggatccggtcacaatgctctctgccgatgagctcttctccgacggaaagctcgtacctttgaagttctctggccctaagacgacgacgacgacgacgtcaacgacagtcaacacaactaccaccgaaccaagaggatcaccagaggttctgaaatcatgccggagacttgagatggagatctctgacctcttctctcctaaagctcctcgttgtacgactcgatggagagagcttttaggtc

SEQ ID NO: 563 - DNA, 455 bp, Arabidopsis thaliana
ccgcaagagtgtctaagtcagcttcaacaataagttcaatgtctacttctcgctcttcagtaaagaaggaaagtgtctcaactttactgagaaagaaacaaaccgctccaaagtcattgcccatttctctcaatgtggatcagtcggtctccgatcctactgctgttccaacaacaagaaaatcgttgatcatggaacgaatgggagataaagacatcgttagacgtgcatttaagagttttcagaagagtttcgaccaaatgaaatctactgatgatgggcaagatacagctccaaagcaggttcttgcaaaggcaactgctgttcagaggttaggtacaactggtcagaaaaatgtcaggcttgcaaaatcagatggcacggagagaaaaggtcctaactctcaccgttcttcatctgttgtatcaaaaagcaacgggacagccgagaaacag

SEQ ID NO: 564 - DNA, 455 bp, Arabidopsis thaliana
ccacgcgtccgattcttcgactcactttcggtttctgatgttttgtctctctgattgaaaaaggtaaagatcgggttttgcaagatgggaaacaaagctacaacggtgaaagaagaacgggaagagatccatttgaagattgtacctccattggacaaagtttttctgcgttggctcgcaagagatctccagagagttcatggattcaaaccgaagaacaacactcgtgcgatcactcctccagatagctacatcgagtttatgcggttaaatggatcgcttgatgtagatttagatgaccctgatcttgcccatttgttcaagtaaaaaggggttcttctattgttgtctctgtttgttatgtatgaagctttcaaagtcttagtatcttttttgattactcatacagtcatacttaaagcttgtgttttggaagctcaaaaaaaaaaaaaaaa

SEQ ID NO: 565 - DNA, 455 bp, Arabidopsis thaliana
  misc_feature (1)...(455): n = A,T,C or G
tttttttttttttttgaaatggaaacacacaaatcgttgtagaaaacacgtacacagtacatatataattcaaaacacacacaaaaaagggcaaaagaatatacaaagggttttagagttatagggaagttatggcacaaaaggatgtacttggtatactctctcatgtttgcttctcttatcacatagatggtacttaccgtaaacttgacgccgacaaaaaacaaanaacaataaaaatgaattccagatatataaacatccaaactctctcaccatcctcacaatttagatgagattaattaactatgaatgtcgtccaggagcgttaccgatcagtctgcattgttcaggtagcattgtcgatatcacttctccatgcaatgcaaacagttccccgtctatcccgcaactgtcatgcgtatttttccccgcctttatcttcactgatttca

SEQ ID NO: 566 - DNA, 455 bp, Arabidopsis thaliana
cctctagagcggccgccctttttttttttttttttttttttttttttttttttttttttttttttgccaagtgtgctctgtttattgtaaaacttttgaggttattgagcaacaataaggcaaagacgaagactaaaactcctaaaagaatcgtatctctcttctcaagttaagatggtgattggtgaaaacaaaagacagaatttagtggatctagtagtccatgcctcccattccacccatgcctgctcctgctgctcctgactcgctttcgtctttcggaagatcaaccactacagcttccgttgtcgtcaacaaagatgacacactcgcagcatcaaccaaagctgtcctgatcactttcagagggtctatgattccagctttcaccatatccacatattcacctttagcagcatcataaccgaggtctgggttatcttgctccaagagct

SEQ ID NO: 567 - DNA, 455 bp, Arabidopsis thaliana
cctctagagcggccgcccttttttttttttttttttttttgttcgcaagctagagcatttttatagaataccctttagcaatataaacagaatactcagagttcttttttgtttttgtttttcaacttgtacagacagtgtggtaacatatgtaagtggtataagaaacgaaccaatacctaaacatcatcagagctcacacaacatgaacaccaaattttattctagatgatgtgtgatgagagttttttacacctactacaatcggatggtgcacataaccgtggtcctgaaatcaagttgatgattgaacggtggctttgagacaaccgatctccaagtcttcttctttggatcatacatatgaatcatcaaagatccagctttcctctgttgtctagtatgccttgtatccatcagattataaccatccaaaagaatcataacatgtaatt

SEQ ID NO: 568 - DNA, 455 bp, Arabidopsis thaliana
cgcggccgccgagattgttgtattctttattcaaaaagtggaaggaaaataaagaaatcatcatttcttcttgaagaggaagtgtgcaatcatccactcgtctccattgttgtatgcgaaaagctcagcaagcgcgatgaagaaggttctccagtaaaccgtccacttcactgcttcttctttcccataagtcacttccattatctcttttacggcaactatctccttatccattcctttcagccactcttcacttgtctttgcataatgcgtcccgttaacgagccaatgatccataatcgaaacattttcttggaaatataggagaagatctgctgatggcattgttcctccgctgaagaagtgtcttgtgatccagtcatcgtcattcacatcctcaaagtggtaagcatatgtcttatggcagagatagtgaacaaacagaagactatctt

SEQ ID NO: 569 - DNA, 455 bp, Arabidopsis thaliana
ctacagagcttagggtttaaactttcttcacgataattttccgatgggagttccgtcgttctacagatggcttatccagaggtatccattgactatacaagaagttattgaagaagagccactcgaagttaatggcggcggcgtcacgattccaatcgattcaagcaaacctaatcctaatggttacgagtatgacaatctttatctcgacatgaacggaatcattcatccatgtttccatcctgaagacaaaccttctccaactacatttacggaagtgtttcaatgtatgttcgattacattgataggctttttgttatggttcgacctcggaagctcttattcatggctattgatggtgttgctccaagagctaaaatgaatcaacagagagctagaaggtttagagctgctaaagatgcagctgaagcagcagctgaagaagagcagctgc

SEQ ID NO: 570 - DNA, 455 bp, Arabidopsis thaliana
gtaaagatcgacacagcaaagtcttgacttctaaaggaccacgtgaccgtcgtgtccggttatcagtctccaccgctcttcaattctatgatcttcaagatcggttaggttatgatcaacctagcaaagctgttgaatggttaatcaaagctgctgaagattcaatctctgagcttccttcactcaacaacactcattttccgaccgatgacgagaatcaccagaatcagacattaacaacagttgctgctaattccttgtctaaatctgcttgtagtagcaattcagacacgagcaagaactcttctggtttgtctttatcaagatcggagcttagagataaagctagagagagagctagagagagaacagctaaagagaccaaggagagagatcataaccacacttcgtttaccgatttgttaaattccggttcagatccggttaactcaaac

SEQ ID NO: 571 - DNA, 455 bp, Arabidopsis thaliana
  misc_feature (1)...(455): n = A,T,C or G
gattaagaaaatggcattacgggtaattgctgagagactttcagaggaagaaattggaggtctgaaggaattgttcaagatgatagacacagacaacagcggaacgattacttttgaagagctcaaagcgggtttgaagagagtcggatctgaactgatggaatcagaaatcaagtctctcatggatgcggctgatatcgacaacagtggtacaatagactacggagaattcctagcagcaaccttacacatgaacaagatggagagagaggagaatctggtggctgcattttcgtactttgacaaagacggaagcggttatatcaccatcgatgagcttcattcagcttgcacagagtttggtctatgtgatacacctctggacgacatgatcaannagattgatcttgacaatgacgggaagatcgatttctcggagtttacagcaatgatga

SEQ ID NO: 572 - DNA, 455 bp, Arabidopsis thaliana
gctgtttctactggctttatcaagctccttaccaagtctgactctgtcgttagtacctaccgtgaccatgtccatgccctcagcaaaggtgtctctgctcgtgctgttatgagcgagctcttcggcaaggttactggatgctgcagaggccaaggtggatccatgcacatgttctccaaagaacacaacatgcttggtggctttgcttttattggtgaaggcattcctgtcgccactggtgctgcctttagctccaagtacaggagggaagtcttgaaacaggattgtgatgatgtcactgtcgcctttttcggagatggaacttgtaacaacggacagttcttcgagtgtctcaacatggctgctctctataaactgcctattatctttgttgtcgagaataacttgtgggccattgggatgtctcacttgagagccacttctgaccccgagat

SEQ ID NO: 573 - DNA, 455 bp, Arabidopsis thaliana
tctcaaaattctttggcccctccgcctcccccgccgtcgttaccccctcctgttcctcccccaccaccgtcgcatcaaccgtactcatatcctccgccgccgcctcctcctccgcatgcttactatcagcaggggccccactatcctcaattcaaccagctccaagctcctcctcctccgccacctccctcagctcctcctccgctcgttcccgatcctcctcgacaccagggtcccaatgaccacgagaaaggggcctccaagcaggttggaaggcgggagcgtgctaaaccggatccatcgaagcaccaccacaggtctcatcttcctcattctaagaaaatcgagaccgaagaagagaggaggcttaggaagaagagggagttagagaaacaaaggcaagacgaaaaacatagacagcagatgaaaaattctcacaagtctcagatgcccaa

SEQ ID NO: 574 - DNA, 455 bp, Arabidopsis thaliana
ttacgaacctcgcctcttctctctcttcactctcgttctcctcccaagtttctcaaagacctaacaccatttccttcccccgcgcgaattcagtattcgcattaccggcgaaatccgcacgccgcgcttctctatctatcaccgccacggtatctgctccaccggaggaggaggagatagttgaactgaagaaatacgtcaaatcgaggcttcccggaggatttgctgctcagaagattattggcactggacgacgtaagtgcgcaatcgctagagttgttcttcaggaaggtactgggaaggttatcatcaactatcgtgatgccaaggagtaccttcagggaaatccattgtggcttcagtatgttaaagtaccattggtgactttaggatatgagaatagctacgacatatttgtgaaagcccatggaggcggtctctcaggtcaagctcaa

SEQ ID NO: 575 - DNA, 455 bp, Arabidopsis thaliana
  misc_feature (1)...(455): n = A,T,C or G
ttagaacaatcggcacacgctttttcatttcaatcttcttcttctactcttaagtatctcaggtctgttgagagatggcagatcgattgacacgtattgctattgtgagttcagaccgttgcaagccaaagaaatgtcgccaagagtgcaagaagagttgtcctgtggtcaagacaggaaaactttgtattgaggtgactgttnnntcnaagcttgcttttatctcagnggagttgtgtatcggttgcggtatttgtgtgaagaaatgcccgtttgaagctattcagattatcaatcttccaagagacttggagaaagatacgacccatcgttatggggcaaacacttttaagttacacaggctcccagttccaagaccagggcaggtgctagggttggttggaaccaatggtattggaaaatcaactgctctgaaaattttggctggaaagctc

SEQ ID NO: 576 - DNA, 455 bp, Arabidopsis thaliana
aacaggcgtagacgaaaccaaagatctcttacaacgattgcttctgataccaaaccttgtttatgcccgaaaactcttcgatcatcatcaaaattcttgtactttcctctacaacaagctcattcaagcttactatgttcatcaccagccccatgaatctatcgtcctctataatctcctctccttcgatggtctccgtccaagtcaccacactttcaatttcattttcgcagcttctgcttcgttttcttccgctcgacctttacggttgcttcattctcagttttttagatctgggtttgagtccgattcgttctgctgcactaccctaatcactgcctatgcgaagctaggagctttgtgttgtgcgcgcagagtgttcgacgaaatgtctaagagagatgtacccgtgtggaatgcaatgatcacgggctaccaacgacgaggtgatatga

SEQ ID NO: 577 - DNA, 455 bp, Arabidopsis thaliana
  misc_feature (1)...(455): n = A,T,C or G
atggaggctttggtttgccggaaattgggagatccaactgcgacgaatccaggtagtccagaatctccggtagaagtaagcaagactcatccgatcccgtctttgaattcagacacgtcggtgagagtcagagttattgctacgagcttgaattacgcaaattaccttcagattctcgggaaataccaggagaaacctccgttacctttcattccgggctctgattactccggaatcgtcgacgcgattggtcccgccgtcaccaaattccgcgttggagatcgtgtctgttctttcgccgatctcggttccttcgctcagtttatcgtcgctgatcaatctcgtttgttccttgtaccggaaagatgtgacatggttgctgcagctgcgcnncntnttgcgtttgggacttctcatgtagcacttgttcatagagctcgtttaacatttggtca

SEQ ID NO: 578 - DNA, 455 bp, Arabidopsis thaliana
tgatcataacgtgattcgaaaattggatatagataggtttcttgttggatcttgatccctctggaaaaggaggggagaatagcagttcatgatgggattttgtatctgcccgttggagtcacctgcgagattactatggagtacaagcttcttccgccataagatcatgatcttctaatccttcctacttcttcccatctttttaatcatcttctcgctatctctgcttcctctttctctctgtttcctctttctcagaactcagaagtagttgttgttttatttctgttgatcaaaaatggaatccaattcgtttttcttcgatccatctgcttcacacggcaacagcatgttcttccttgggaatctcaatcccgtcgtccaaggaggaggagcaagatcgatgatgaacatggaggaaacttcgaagcgaaggcccttctttagctcccctg

SEQ ID NO: 579 - DNA, 454 bp, Arabidopsis thaliana
ttatatcaaagattgtgtagaagcaaagttttcgaagattcagctcatcaataaggtcaagaacatgaagagaaagtttacatacaatcaggggagatctaaccatggggaacaactttcttttactaatactgatgatgatgaaatcttcaaattgtcattgatcatatgggacaagaatgaatcagagtatgtttctaatgagaatatagaccaagctaaggatgttccttctggtgagccagagactaatgatgtgccttgtgaggagcaagacgatagggatgtgccttgtgaggagcaagagcgagcgagtatcgagattgataatggtgtgagagagaaattggaccaagccaaggatgttccttgtgtggagcaagagagtgaggatgtgccttgtgtggagcaagagcgggtgagtatagagattgataatggtgagaaagagaaa

SEQ ID NO: 580 - DNA, 454 bp, Arabidopsis thaliana
aataactttcacaacagagtcaaagagttccaaatcgtttgtttgtattttgtacgatcaaagttgttggtacttgtaagataatcgaaaccaaagatgcggatgagctgtaatggatgcagagttcttcggaaagggtgtagtgaggattgtagtataaggccgtgtttggcttggatcaaatcgcctgaagcgcaagctaacgcaactgtctttctcgccaagttctatggccgtgctggactcatgaacctcatcaacgccggtcccaatcaccttcgtcctgggattttccgatcgttgttgcacgaagcttgtgggaggattgtgaatccgatctatggttcggtgggtttgttgtggtcggggaattggcagctttgtcaagacgccgtggaggctgtgatgaaaggagaaccgatcaaagagatcgccacagacgctgcgacgatcg

SEQ ID NO: 581 - DNA, 454 bp, Arabidopsis thaliana
cggccgcggtgttttgagcatcgagcagttagcttctgttgatggtttatgcgagtgggtgttgaaggctataggcgcatcggatccggttcatacttacaatatcaatctatcagttttcacttcgattcctgatctctgggggattgatcagctgttccctatagttcctatccataagctcgatcaaaggcccggggctcgcggaatcctttcagatttaacgtgtgatagtgacgggaagatcaacaagttcataggcggtgaatccagcttgccgttgcacgagctggacaagaatggcagtggaggaaggtactttttgggtatgttccttggaggggcttacgaggaggctctcggtggagtccacaatctgtttggtggaccaagcgttgtccgggtctcccagagcgatggaccacacagctttgcagtgacccgagcggtgcct

SEQ ID NO: 582 - DNA, 454 bp, Arabidopsis thaliana
tgtgtggatggaaaaggacttgtgctacccagccaaattagatatgtgaaatactttgaaagaattttgacctacttcaacggtgaaaaccaaccaggccgtaggtgtatgcttaggggattccggctccataggtgtccctattggattaggccatccatcactatttcagatcacaatggtgttctctttaccacgaaaaagcatcctcggaccaaggatctctcgcctgaagacttttggttcagtgccccaaagaaaggggttatggtctttgccttacctggagagccaggtctaacagaattggctggggacttcaaaatccaatttcatgaccggcaaggagatttctactgctggttaaacacgacaatgatggaaaatagagtgatcctaaaaaccagtgagcttgatgggtttgacaagaggaagctaccatcgcctggattta

SEQ ID NO: 583 - DNA, 454 bp, Arabidopsis thaliana
cgtctcttttctccattgctatggctctctcaactactccttctcagatgtccgttgcacttccaactagaattgatgggtcgagccgatctatgattaaggttcaaagtataagcttcactgataagtcatggggtcctcctctgctgagactagattcgaaatctagaagcttaggtgtgaaaaaaaggtccacaatatgcatgtcacttcagcaatcaagcaaatccaaagtcttggttactcctctagaacttgaagatcccaaagagactcccttaaacttgtttaggcctaaggagccttatactgcaactattgtttcggttgagagaattgttggtccacaagcacctggagagacttgccacattgttattgatcatgatggtaatgttccttactgggaaggacaaagctatggagtcattcctcctggtgagaatcccaagaa

SEQ ID NO: 584 - DNA, 454 bp, Arabidopsis thaliana
cgtccgttcatggcggatgagaaacgtgtatctgaagatgaccggtacaaggagtttgttttaggaaatggaattttgttgagtgtaggaagattgattgatgcttatctcgctcttaactctgaacttacactctctagctttgttgagttatctgagttagtcccggaatcagctaggccgatacacgacggtctctacaaagccattgacactttcatgaaggaacatcccgaactaacaaaatccgaaaagaagaggctttgtgggttaatggacgtgaggaaactgacaaatgaagcatcaacgcacgctgcacagaacgagagacttccactacgagtggtggtgcaagttctctactttgagcagctccgagcaaatcacagccccgtggcgtctgttgcggcttcgtcacactcgccggttgagaagacggaggagaacaaaggag

SEQ ID NO: 585 - DNA, 454 bp, Arabidopsis thaliana
gaatcgaataatcaacgctccttcatgtgaaccgactaattccgtcgaaccgtgatccaatcctcaccgtccaagtcccatgtggactccaccacaacatgaccaatccagcttagcactccaattctctcatcctcgtgacattcccaccagcttgaacggtcctctgacacctcctcttccactgatctccagaacatttgatccgtcacacttgtcggtgagttcgtaaccaaaccggttaccaattccggttctttattaaccaagaacggatggtttagtagttgactcgctgtccatctctccgtcgcttcttttttcaaacactttcctaaaaaatcctttgcttgttccgtaagcgagcaaggcagctctggtaactcacctaaatatccgacccggtaaagaaccgaaaccgggtcggtaaaatccgccccaatccacggctgag

SEQ ID NO: 586 - DNA, 454 bp, Arabidopsis thaliana
  misc_feature (1)...(454): n = A,T,C or G
acatagtttatattacaccaacaaagatcatagacgacaacaacaacaacttatgatnnntctttttcactagtacaacaaacagagaccagaattttcccggtcaccagatcctaaaccccttcaaagaggttgttgaagagtgaccaccaagggacttgtcacattccgtttcccatctgaccaaactatatgaccagtctccacatttgtcgctcctggtgacaacttcacctctgtggtcttaaccctaacaacaaaactcagtttctgccccacccgtctgaacgatagcttctccggctcaaccgtcaccgtagtccctctaggcggcctaatcttaatctcgtaaaccgaatccgaatcgcctacatttgtcacagtcctaatgaaatgtgtcgacattttactctctccatactgctgaaacacgacagagaacgacgggtagttt

SEQ ID NO: 587 - DNA, 454 bp, Arabidopsis thaliana
ctttttttttttttttctctagatacattgtagattccaatcaagatttggttctatcacttgcttttagccttaaaagttgaaaccatgccgaagaaaatttcggatacagaactaagcaaaatcatacactaaaggcttatatatacacatgaaaacttcttcggtttaaaatcttcatgtatgatgagttttcgatgtgtaattgaaagtgatttaggaacttagtggtggttgtttagtgttgttgtctccggttttctttttcgaatcttgttcgaaatctgcaagatttgccagttcatcgactgcttcaacggctgtttgaattctagctgcgttttcgattaacaacgaaaccaaagtggcaactggaaggacttcatgtaggctcatggacgtggttctctcttcgctgtctactttgttctcctcttcagatggaacttcttca

SEQ ID NO: 588 - DNA, 454 bp, Arabidopsis thaliana
ccacgcgtccgcagaaatctctccgccccagatccatctctctctcaagcaaacactcttaaacccttttgatttctcctcataattattctcgaaagctccattgtttattagttattcctgcaaattattcaattttaccattttgcttctggtttttttagtcgtctctctctctcttcaatctcttgaaaggtacttgctttatgcacaaaagttataatcctgggtttttttgtactacactgtagttattaatgcctgaacaatcttcttgatctgggtacattttgcagattgagtaaaaatcattccttttttttctgggttatatacactgttcttcgagttctagggttccttaatttcgtttctcctttttggaaagtctctgactttatgtgttttaatgggtctagttttttcatgtggtccatttaattagctagtggaa

SEQ ID NO: 589 - DNA, 454 bp, Arabidopsis thaliana
ctttttttttttttttcagacagatttcattatttgtttttagttgttaaaattttgattaacaccaaaccaaactaataattttttttaaaaacttgtatcacaagttttgttgcttctcttataaaccaagggaaaagtagattatccggtttatggaaaaataaacatgcattcacttattttgaatgagtttctaagcggtaactccaatgggaacattcttgagtcttgatgttccataaagggtttcttcgaagcggatgatctcgttctttgagccataagcaacttgagttctatcgtcgaggttgatgatggtcttgtcaagcacggacttgtgtccatcactgctgaatccaccagcattctctatgagcaggccaagaggagccacttcaaacaacagcctcaactttgccttagccgtaggagaagtcacatttgtgaagat

SEQ ID NO: 590 - DNA, 454 bp, Arabidopsis thaliana
ccgacaaacacaaacacacacaccaaaaaaaacacagaccttaaaaaaataaaaatggttgatatggattggaagaggaagatggtatcatcagatttaccaaactcacctaagctttcttcaaagcttcacgtaactattccatcaccgttcaaaatcgtccctgtttcatctccgatctcatgttcagcacctgctctttgctctgcttacgagctttaccttcgtctccctgagctaagaaagctctggtcatctcgtgattttcctcaatggacatcagagccgattctcaaaccagctcttcaagctttggagatcagtttcagattagttttcgccgtttgttctgatactagaccgtacatcaaccaccgtgaatggaaccggaggctagattctctcatcacgaagcagatccagcttgtagcagcgatctgcgaagatgaagaag

SEQ ID NO: 591 - DNA, 454 bp, Arabidopsis thaliana
ccgccttaccaagaaattcctcttgccccagaggcggcttctgttggactcgaaattagggttgttggaaatgatagcggagaaaaggtttccatactggctggtactcttgcgcggttggatcgggatgctccacattacaaaaaggatggttataacgacttcaatacgttttatatgcaagcagcatcaggtactaaaggtggttcaagtggttctcccgtcattgattggcaaggcagggcagtagctttgaatgctggcagcaagtcgtcaagtgcatcagccttcttcctaccacttcaacgagttgttagggcgttaagttttctccaaaaaagcattgactcgcggacggataagccaaaagcagttcatattcctcgtggtacacttcagatgacatttcttcataaaggattcgatgagatacggcgacttggtctcaggagcg

SEQ ID NO: 592 - DNA, 454 bp, Arabidopsis thaliana
tttttttttaaaaaaaaaggttccacacaaagcttcattatataatcatagcaagagacttattgttgaaacaagtagagagaaatagaaaccataaaatttgtcgagactttgatacaaacataggaaagatgaggatccatacgttatacattggaatcctttatagttgagataatagctttcatcacttcttgaggtgagggaaacaagcgacaacatcggctttcggatgcttcgcctccgcgtgctccctgcatttcacttccgatgtcgtgcagatgaatgtttgcatacaaaccttgcactgaatcgacatagctttcttgttagcttccaattggctaccttttcctgcagccttagccttctccaagtttttggcacgagccatggctgatttctgtgcgtttcctccacccatctttctgatcgattagaagaagaactcaaa

SEQ ID NO: 593 - DNA, 454 bp, Arabidopsis thaliana
tctagagcggcgcccttttttttttttttttttttttttttttttttttaaaaggaactctttatgattactgtcttgaggaaaccttacatataggatactgtcaaaagtttttcatttggtagcttctgtaaattcacagaatgctagttttcttattgtgtgtaaaactgtttttgcaataaaggctaatagttgagaaaaaaggaggactctatggtcctatctgtgtgttcgggttctagtagttttctcttgatggcattggagcaaagacgagccatcatatggtggaaggaaagcatatcagacagccgctccgccgaaagtttgtccattgctctctcttgttcctctttcattttcatccttttcatatacacacatgagttcctcaccgtcgctcccatctgcttcagcctattctcttgttgcttgcttagaactgtattag

SEQ ID NO: 594 - DNA, 454 bp, Arabidopsis thaliana
tttttattcgttgatgacatttcaattttaatatagtttttacacccaaaaaatacaaaggagcaaaataattaataacatcattcatataaagttcttaagaatatataatttcacagtaaaacaattttattctatagaggaatctgacgtagaatcatcgagtaaacttccattgtggctatcaggagatccgataggcttattcagatgaagaggttgctttagagtccaatacattatactcgccgtcaatgtcagcatcatcttctgattcacctcgattatatcttcagggagtaagaaaatggagcaaccaagtttcctggctatgctaatcacataagttgcattcatctttttctcttcatctgtaactccgtttgtaacaagactccagtttacggatcttggctgcactgaactcagcagctccaagaaaaataccccatcg

SEQ ID NO: 595 - DNA, 454 bp, Arabidopsis thaliana
  misc_feature (1)...(454): n = A,T,C or G
gcggccgctgtgtcattggataagtaaatcaaccataagcggatcaattttatcataaaaacctatataatacacagaggagaagctcgcatatataggaatgcgttttcttttgtatatgaatgtcacaagaggaaactatatattcatttgctcatttgatttgcttaacctcttgaagcatttcaactactttcttcatctttggcctttttgcaggtgtgatgtctgtgcaaagcaatgcaactttcagagctgcannatctctctcctccaagcaaaagacacggtgctaagcttggcatcgagtatctgttccggtgtttctcctctcgctgaagctccatggacccatttcaccaaatctactccttcaccaaactcttnntccaccggcgctcttgaggttagaatctcaagcaacacaactccataactgtaaacattccccgga

SEQ ID NO: 596 - DNA, 454 bp, Arabidopsis thaliana
ccacgcgtccgatttcgcctagctttcttcgttctagggtttcggatcttacttaattaccaaaaacccttgaatccattactctgtgtgagcttaaatctcttaccttttatcactttcaatcgattgggtattaagttgtaaaggaaggaacttggaatcatgaagcttgggcttttcactctctcgtttcttctgatcttgaatctagcaatgggtagattcgttgttgagaagaacaatctcaaagttacatcacctgattcgatcaaaggtatttacgaatgtgccattggtaatttcggagttcctcaatacggtggtactttagtcggcaccgtcgtctatcctaaatccaatcagaaagcttgtaaaagctactccgatttcgatatctccttcaaatccaaacctggacgattaccaacttttgtccttatcgatcgtggagatt

SEQ ID NO: 597 - DNA, 454 bp, Arabidopsis thaliana
ccgccgattttcccggtaaaaatgaacgacggagatgtatcgaggcagatccagcagatggtgagatttatccgccaagaagcggaagagaaagcaaacgagatctcggtttctgctgaagaagaattcaacattgagaaactccagcttgttgaggcggagaagaagaagatcaggcaagattatgagaagaaggagaagcaagctgatgttcgcaagaagattgattactctatgcagctaaatgcatcaaggatcaaagttcttcaagcgcaagacgatattgtcaatgccatgaaagaccaagcagctaaggatcttctgaacgttagtcgcgatgagtatgcctacaaacagctcctcaaggatctaattgttcagtgtttgcttcggttgaaagaaccttctgtgttgttgcgttgtcgtgaagaggacttgggtttagtggaagctg

SEQ ID NO: 598 - DNA, 454 bp, Arabidopsis thaliana
gccaaacgacaaatacacggttacaaaatgaaagaagcccaaaacaaacccagcgaaaacaagatcagaaccgtgcggtacaccggaaacacgaacatcgccttctagaaccgacgctagcaaggacgactcctatgtggctacgacctcgacatcaaacttttggcttgagctagcgaaccccgccgcaaatcaacgccaagaacaagcctaacctggaacaatcctttcggaaaagggagaaccgccacaaccgagacccaatccctcctctccccaacctagcaagacgaaggattcgaaacttacccccatctccactgatgctcacccaaggacctctcccaaagcaaacctcacttcagatccggctaagggaaaactagctacggcggagaagacggtctctggctcaggcaagccatcatccaccaagatccagctaaggaacacc

SEQ ID NO: 599 - DNA, 453 bp, Arabidopsis thaliana
attgtgtgatcaatcaatcttctccgatttcaagcttctcgatcaaaagaatcatcatgggaggaggaagagctatggcgacggcagcgaaggttgctggaatcggagttggtaaaggaggattcaagggatttggatttcctccggcgactgagcagtttcgtgttaaaaccgcggcggctgcggcgtcgtctaaaccggtttcggcttcgatttcatcggtggttcattcttctgttgaagaagatgggatgattatgcagagaccggtttgggatgattgggaatttgctgaagaagaaccgattcctagggttgtttttagcaaacctcctagtcttgaagaagctaaagaagctactgaagatcttaaagaagcaattaatttggtgtatatgtcatctccaaagtcgtctgctgctatggaaggatcaaatgatggtggctctgttt

SEQ ID NO: 600 - DNA, 453 bp, Arabidopsis thaliana
ccacgcgtccgccttgataatccacccaatcgctgtcattctcccatcaatctagctgctttcacaaaccattgtactgagatcgtatctttaaggtaaatttcaaatcggagtcggcgagatcgaaataggaacctggaagtcggagaatttgtgtaaattcggttttttttttttaattctccgatggatagtttaagtgatatcgatggtgatttcgatggaagaaatgaaggaggatcgtcatcggattatcgattgttgggtcggcagattacggttcatcagttcatgggtggtggcaaagctgctgacttgctcttatggaggaggcgacatctttctttgggggttatcattatatcaactgtagcctggcttatattcgagttttccgggttgcctttcttatctgtttcttcggatgtcttactcatcgtgatcatgatatca

SEQ ID NO: 601 - DNA, 453 bp, Arabidopsis thaliana
atctttttgatctgtgcgtatggttgttgtgtctcttcttcctcgaatctcgatcgttacatcaccgggttctagccttcacgatgtgcttttgagcatgagatttggtttgacgcgacatctccctctcaaacgatctttctccaattattcaatcacttccgtatctccagaacaacagctcaaatctccggtgaccatggcgacgaccgagagcaagaatcttgtagaagcttccaaggaggagacaaacaagaaggagacagaagataagaaggaggtgggagtttcggttcctccaccgccagagaaaccagagcctggcgattgttgcggtagcggttgcgtccgatgcgtttgggatgtttattacgatgagctcgaagattacaacaagcagctttctggagaaactaaatcaatttgactgatttttcctcgcattgttaatgg

SEQ ID NO: 602 - DNA, 453 bp, Arabidopsis thaliana
tactgtttctttgactggagggttgttggagaaggttcctagtgatactgctgtaaaattggctttgaaggatctgcagcttaagtttcttgagtcctcgtttactagtacctaggacatgccactcgttcagtttcttggcaaagatctttctgtgaaggtaacacatagaacccttggcggcgctattgcagtatcatccaacatatactgggaaaatattgaggtagattgtgtagataccgacgtagaacatgaacatgagaatagctggaacggtcacttagttagctgtaatgggtctaccccactgaggcgtgtcttttgggttgtcaacggaagacatgatgagcatagtggcagcactcttacaccttttctggacataagcataacacatgtgattcccctcagtgaaaaggatatggagtgccacagtgtaagcatcgtggc

SEQ ID NO: 603 - DNA, 453 bp, Arabidopsis thaliana
tagctatgatcaaatgttgcgggtcctgaatcaccttacttggaaaacattcgctgagttcttacacctatcaacggttcgtgcgccctgttctgcggctattttcaaggaaatcgatgaaccattacagcttgatatgtctgagttatcgttggatgaaaactttatgccaagcaattatgatgcttcagaaggctatataagtgtcaggtatgaagtcatggaattaccggtagcttttcctttccagaaacctcctgcggacaagcctaacccaaaacaaggagtcggccttctagcttggagcaaagacagccagtacatatgcacacgaaacgacagtatgcccactgctctgtggatatgggacatgcgcctcctcgaggttgcagccatcctggtccagaaggaacccatccgagcagctgtgtgggacccaacctgcacacgcct

SEQ ID NO: 604 - DNA, 453 bp, Arabidopsis thaliana
actgaaattaaaagatgaaaaagagacaaaaagaaaaatttaaccatcggttaaatatcaatattggaccgatacaaaaaattatagttaaacgttactgagagatggccctttaagagagagcgacgcaacggcctcagcgacggttaagaagagaaactcgggcctcatgaactctttttgttcgtcagctctttgaagcttctccaccacttcgcttagagggttcacaaacacaagctcgatgtccttcttggcggttgttttcttaagttccttaaaaaaggacactccgtttgtgtctacaccgctcacggctgacatttcaagaatcaagaactgtaggctagaatgcttctcttgagcttcctcttcttcgcattcttcaatccaacgagatgttctttcagtgaggtagttagaattggcgaaattgacaggagattcgatgct

SEQ ID NO: 605 - DNA, 453 bp, Arabidopsis thaliana
  misc_feature (1)...(453): n = A,T,C or G
agcaccggatatgcttaggaagcggcatttttttggttgttgtgttataaacaattgtttatatgtagcgggtggggagtgtgaaggaattcaaaggacacttcgctcagctgaggtttatgatccaaacaagaacaggtggagttttattgctgatatgagtacagcaatggtgcctctgatcggtgtggtttatgacaaaaagtggtttctcaagggtcttgggtctcaccaactagtaatgagtgaagcttatgacccagaagttaattcatggagcccggttagtgacgggatggttgctggttggcgtaatccgtgtacttctctaaacggtcgtctttacggattggattgtagggacggatgcaaactcanngtatttgatgaatccacggattcatggaacaaattcatggacagtaaagctcatttgggaaactcgaagtcgct

SEQ ID NO: 606 - DNA, 453 bp, Arabidopsis thaliana
ccacgcgtccgcagagaacagggcaaaacagagcactgaagaaaagagagagaaacttaaaaagtctgagatcagtggaagacagagcagtggcgatgagagtgagaagaaggacataactgtgaagaaacaaagacaaatcgttgctcaaaatcaagatagcccaatgaagaattacgaaaggagccggtcagagaatcacgagggctcgaagaagagttcttgtgtacaactgaagagatcagagacagagagacctgctgatagaattgtttctgatgatgagctacgatacaaaatcgagtctttcattgctagacagaggaggaaccaaaaggatgaagagttctgtattatctaaaatgtataaatactaaaaagcaaagaagaaaaaaagaaaaactttagtttatgcaataccattcacatatatttgtgagtgtttgtaaaaaa

SEQ ID NO: 607 - DNA, 453 bp, Arabidopsis thaliana
accagaaatacacacttcacaaaatacatagcaaccccgtacgttttatttcttatggtacacccaaaacacacaacgaaactcagactcatttaagaaattttaacctcttaaagttgcaaatgcctcttcttattctctttatttattatcttcttattcttacttccttgattctttcccttactttctttgtgattagacgatcgatcatataaaatataactaaccgtcgaccttcaaatcggtttcagagtcccacttaaatgctccacttggctgagccgcgtcggcgatatcctccagcgtcagctgcgaattcgacgttttcaacggcacaatctcatgcccgtacttcgctgcgtctccacaataatcttgatcagcgtgcattttcctcaccaacttcttaaacagctcaaagttgttttcttgaaagacagtatcggataa

SEQ ID NO: 608 - DNA, 453 bp, Arabidopsis thaliana
cttttttttttttttttttaattcaaactcactcgtagaacaaaaatatgagattacaatatcccagcctaacgccagtactaaaccaaaacacacataaaacccatcttttcaaatatcacaatcttgatgatcaatgcaaagatgataagaaacaaacaagcaaaattgaataataataacaaacactaaatgagtaataatagtcttgaatcataaatatatggatagatggtaatactaattaatatagcgcttactctagctccattcatcacattaatttcctccttcttgttcaatgcatgtcatcatgaatttgaacctccatggttgtcttagtttagaggtgtgagtttggaggagaagaagaagagtttggttgagtagcttcttctccgtggagtagtcttgtagtgttggggaaactaaggccttgcatcggacgcgtgg

SEQ ID NO: 609 - DNA, 453 bp, Arabidopsis thaliana
ctttttttttttttttttttttttttttttttttttttttttttctaagttatggtgtgcttatatataactgttgccacatgaataatagatattaaagagtacaacaatgttgattaacttagttcctctgtacattgaagattccaaatttgttcatggagctacaacggttcaacaataattcaagctcaaaaaccaagaactctaagatgaaacacactcacagacagacatgaaagtgatggaagatagataggtatgagatcataagtctgtcttcactctttagttgaaggtttggacaatagtgttgtgccatgggtcagacaagtgctgcaacagattctcaaatggtccttttccagtcacattgtgttgaaccacaaaccctaagaatgccaacatcgccaacctcccgtttgctagctctttctccttggcctcttgcgt

SEQ ID NO: 610 - DNA, 453 bp, Arabidopsis thaliana
gcggccgcaaagaaacctcgggatccttcgcaggattgtaccaggctgtgaagagatcgaagacgaggaagccttgtttctcaagtcaattcagcatctcttgcttctcaaatctcaggttaatttacttaaaaagctagctgatgtatgtggagtctaattaaaagaacgtaagttctcaagttgtttatgcattacattataagatcaagcgagagagacataagaaaacagaggaggggataaagtaaaattacacagagaaaaacgatgaacaaggcgatgaatttttttagtttttgttgtagaaagtgagagcgtaatttgtacttaaggaggaagaagagagagtgagcatgtgttggatcgttgtgacccatgtcttgtaacgattgtaatcgtcggccatgtctaacttgatagctcctctgttcgtcctcaggacaatgagat

SEQ ID NO: 611 - DNA, 453 bp, Arabidopsis thaliana
tttttttttttttttttttttttttttttttttttagagaaactgataggaataacattttcactttcaaacaatagttcctcaactgttaagtcggcaaataatttcttaaatttgcattgaccacatagaaatgggttccagaataatcaacgctgaatattccagaaaggggattaagcttcggtgaagcttgggggcttgtaggcaatgaaactgatgcattggacttgacgggtgttgtcgaatccgatgatcctaatgaaggcgccagggtactccttcttgcattcttcaacttccttcaacacttgagcggagtcggtgcatccgaacaatggaagcttccacattgtccagtatcgtccatcatagtatccgggagtgtttccgtgctcacggtacacaaatccgtgctccaactcgaattcaacacaaggaatccacttgttg

SEQ ID NO: 612 - DNA, 453 bp, Arabidopsis thaliana
ggttggagacgccaacaatgcttgcaaaggatcaatggtggttgaggcttttgcaggaaaagatacacttaaggtcccttacgagtcgaaaggcacaggagggtttaaacgagcttctattcgatttgtggcggtttcgacccgatcaagaattatgttctacagcactttctatgccatgaggagcgatgatttctcgtcattgtgtgggcctgtgatcgatgatgtcaagcttataagcgttcgtaaaccatagatgaatcaccaatcctattacaagaaaatgcatcgtgtggtcttcttttattttccttaaactgtctttggtgtgtgttggattttattgaaacgagaaggtgaaaaaaacagagttttatttacgagagttagggttttatataggcagatgggcctttgcttatattgtattttcttgtatgagaaggcaaaaga

SEQ ID NO: 613 - DNA, 453 bp, Arabidopsis thaliana
  misc_feature (1)...(453): n = A,T,C or G
tagccatgataacacacattcgaggaggaatgaaaaaaaggaattcgaaaaaaagaagcgttcgatgggtttggcaccaaagtaagattttgcaaaatacaaagaatcacaacaaagagaaatctctcccaaaataggtaaataaccaaacgcaaaccggtttgaataatctcttttctcttttcctttctttcatcaggcagtaacttggccgaacaacgacttacggatcactgggagtttcatacggaatgccacatcaagacgcgcatcaagtgtgttctcgcacacgattttcccatcacgagaagctaacacaacacctccagagcagtggagaccatgaggatcattagatttannnnnngggggaaggaatatttttgtgtcaacagcaacctctggggcatgaacctttgctttaccagcatattcctcctttgcgtcatcaag

SEQ ID NO: 614 - DNA, 453 bp, Arabidopsis thaliana
tttttttttaatgtaaaatctcagttgattcaaataatattcattttattcagtttcacattacctgacaaaccaagaaaaacgtagttctgcaaatctgcaatttggtactaatcacagagattataaaagaccctgttttttaagctttcaacaaaaatgaagctgtcctaaaacatatattcacatctttaacacaaagatggagacaaccagaagaagaagaagaaagaaaacacttttgaacgcctctggatcatcagaaacccaagctttccccgagtatatatatacacgaatctgtccagggcgcggcgcagcgagtcgttttgttcttttgtgtactaaactcattttatatttttcctaacttgacatacttgaaaacagagagccatctcgagacactgaaaagctttgtccatcttttgctgtgagccttaccaccgaccg

SEQ ID NO: 615 - DNA, 453 bp, Arabidopsis thaliana
  misc_feature (1)...(453): n = A,T,C or G
atgaccgtgctgttgtggtgctcatgaactggtgaagctcttgtttctcgtatatctctagggagaagtctctcagcgtgtgcgtcgttgttgttgcaattgacgatgaactaccggttgttacgcctgagcttgagctcggagccataaccgacgtcgctcttgataaattcgaaccgctaacgtctgaaacggatacaaagccgctgcttggaacaacttgtaaaggaggtggtctagccatcgtggaagcctgttgaacagcggcgacgtaagacgacggcgannngcggcggcgggaaaagctaataactgaggctgattcgacggaccagcgatttgtggaatcaagaagaaagctccgaccgtcggaatcattgcgtttgatggaatagcccacatcggatacattccttgcggcagaagttgctgagccacagtggatgatgccag

SEQ ID NO: 616 - DNA, 453 bp, Arabidopsis thaliana
aggtgatgatgaactggaagtggagccttcaccagtcagagttaccgaggctgctgcaaaggtttctttgcttgaggaacagataaagcctcgtgccaatcttccacctttgctggttcctcttcgtgatcgacgacctgagagactccactacattggtgtctcttttgggcttactttggacctcttccgtttctggagaaaacataaatttgctccattctacatcagtcaaataccaagtgctgtgactggtgagcacacatgtatgcttctgaaaccattaaccttaagcaacgatgaattcgaagttgatgagtcggatgaactgggcttctttgctcccttctataaagatttcaggataaggttctctaaactgttgagtgataaattcaagaagatggattataaacttgcaatgagtgttttgaaccctaagatcaacttccc

SEQ ID NO: 617 - DNA, 453 bp, Arabidopsis thaliana
tgacaagaaagaaatcaacctatcatggaaaactgaagtttcctccgatctcagtattaccagccggtggattaatggcgacccaaagaagagaaatggtaatggccacaagaccagaccaaacatacacaatcgttggtgttcttcctcttcttcccattagacctttagcaaatggataaagatgtgccaaaacccaaaaactgaagaacactcctccaatcagtttactccactgaggaaccacactgtaaatcgtcctgctgaatccaaccgcaatcgctatcagattcaccataatgatggtaatcggagggatcataagtgaagtccatttcaccatgtacaaatccgcaaactcgtcgtctatatcatctcctccggatttactcgtgagcgtgaaggagatttcgactcctgctacaactttgagcaaaccttgaagcacagctg

SEQ ID NO: 618 - DNA, 453 bp, Arabidopsis thaliana
  misc_feature (1)...(453): n = A,T,C or G
tttctcaatcatctttcttctgccttggaatcctgatcatggcgtcgtcttctctcacttcgaaatccattctcggatccaccaaactcggttcttcttctcttccctcggagctccgtcgtctctcttctcccgccgttcagatctctctccgtacccaaaccaggaagaacttccagatacaagctactggaagttcatatgggactcattttcgagtttcaacttttggagaatcacatggaggaggagttggttgtatcattgatggttgtcctcctcgtattccacttactgaatctgatttgcaattcgatctcgatagaaggaggcctggtcagagcaggatcacaactcctagaaaagagactgatacttgccggatatcnnntggagtctctgaaggaatgacgacaggaacacctatccatgtgtttgtaccaaacacagatc

SEQ ID NO: 619 - DNA, 453 bp, Arabidopsis thaliana
gcgtccggaatctgcgaataccatgttctcttttgtgtggtggatcatcgggttttactgggtgacggctgataccgaggcactagctcaatcttcgccacaactctactggctctgtgttgcattccttgcgtttgatgttatgtttgttgtcatttgcgtagcggttgctagtcttattggtattgctgtttgttgctgtttaccttgcatcattgcgatcttgtacgcattagcagatcaggaaggtgcaccggatgaagagatagagaggcttttaaaattcaagtttctcacagtaaagaattctgagaaagtgaatggcgaaatacgggaaactcaaggagggataatgactggattagataccgagtctcaaaccgaacgtatgttattaagcgaagatgctgaatgcagcatttgtctatgtgcttatgaagatggagtagaact

SEQ ID NO: 620 - DNA, 452 bp, Arabidopsis thaliana
gacgataaatgttatcttctatgtaagtaattacacagctgggttctaaatatcttctacatctaattaatgacctcaaaaattgttacatatatgtgatccttgtgaattggatctaatgaagctgagaagtgacggtgataaatgtatctacagggcaagggatggtcaagccgcccattggatgatcaaacccaaactcttgttcagatttactcaacaaagcttgaaatgaaggctggttcaaatatgagactggcactatgtatcttttcatctggctttctccaacgtacactgcaagaaacccttttggtgtcgaagctgccattgatcgaccttgaaagatcttctttgcgcccataagacctcggaacactcccatttttttgttctgctctgatggatcctggaaaaagattcagcttagaagtctcctttagcttatcaga

SEQ ID NO: 621 - DNA, 452 bp, Arabidopsis thaliana
ctttttttttttttttttagagaaaaggtgttccataaattatcaaaaactcgcaagtttacactgagaaaagtcatcaatacagcaaaattaaaccgggaacaaaagagtgtgtgaaacgacagagcatcaaaaagctaaagtttagaagaaaaagacatctctcgatttcttaagctccgatgatttcagtaggttcctcaacagccatctcatcagccggcctgtctaccttaacaccaacatcttctgctgagtaatctccgtgaacatccatgagcttgccaaggtcgaatttaggggccttgaggatcttgactttacggatgaaaacattctgaagagggtagatgccctgagttgccttctcaatctccctgccaatagcttcaggaatgaacttagcaacaagatccttaaggtcacatgaggaagcttccctaaccatgatg

SEQ ID NO: 622 - DNA, 452 bp, Arabidopsis thaliana
tcttgcagccaactcttaatttctcggtagctgtgattgtggaacttatgaaaggcaagaatccttttaatactacacatcataggttcgtggacgtgagagatgttgctctagctcatgtaaaggcactcgagactccttcagccaatggcagatatatcattgatggtccggttgtgacaataaaagacattgaaaacgttttgcgcgaattctttcctgatttgtgtattgctgataggaatgaagacattactgagctgaattcagtgactttcaatgtgtgtctggataaagtgaaaagtttgggaataattgagttcactcctacagaaacaagccttagagacactgttcttagtctcaaggagaaatgtcttgtgtgatcttctttattgtttttggttacttgttattccttgcaggtctatatacatttcacaaattataat

SEQ ID NO: 623 - DNA, 452 bp, Arabidopsis thaliana
tcctctgtcgctctcaccagttaacagctacagcacaaaactgtaaccacgcttccgatctctaaaacctgagagagagagagagagagagagagacagagagaagtgtttcaatagtttggcgtgaagatggccggaggaggcggatacggcggcgcatcggggaaagttgattacgtcttcaaagttgttctaatcggagattcggctgttgggaaatcgcaactacttgctcgattcgctagagacgaattcagcatggattctaaagccaccatcggcgtcgagttccaaactcgtaccctctccattgaacaaaaaagcattaaggctcagatctgggataccgctggtcaggaaagatacagagccgttacaagcgcatactacagaggagcagttggcgcaatgctggtttatgatatgacgaaacgtgagacctttgagcatat

SEQ ID NO: 624 - DNA, 452 bp, Arabidopsis thaliana
accctacaatttcctaagctctcaagccacaaaaaaccacaaaccgttcttcaccaatatatatatctgatcatcatcaaagtccttctctctgctcataccacaaaccgttccattcttcccctaatcacaaagtgatatttacatagagaagatagagatgggaagaccaccatgctgtgacaagattggagtgaagaaaggaccatggacaccagaggaagatatcatcttggtttcttacatccaagaacatggtcctggaaactggagatctgtgcctactcacacaggtttgaggagatgtagcaaaagctgtagattgaggtggactaattatcttcgacctgggatcaagcgtggaaatttcaccgagcatgaagagaagatgattctccatcttcaagctcttttgggaaacaggtgggcagctatagcatcatatcttccag

SEQ ID NO: 625 - DNA, 452 bp, Arabidopsis thaliana
ccacgcgtccgtctcagagcaaaaaaacaaaaaaaaagaaaaaaaaaccctaaatctaaatctcaccttccacctctgtcttttttttttttgttcttttttttttttttactgtatcttctcttctctttgctctgcaaaaatctcacatccatggatccatctcttggtgatcctcatcatcctcctcagttcaccccttttcctcattttcccacctccaatcatcatcctttaggaccaaatccgtacaataaccatgtcgtcttccaaccgcagccgcaaacgcaaacgcaaatcccgcaaccgcagatgtttcagttatctccacatgtttcaatgccccaccctccttactccgaaatgatttgcgctgcgattgcggcgttaaacgaaccggatggttcgagcaagatggcaatttcgagatacatcgagagatgttacaccgg

SEQ ID NO: 626 - DNA, 452 bp, Arabidopsis thaliana
  misc_feature (1)...(452): n = A,T,C or G
ctgttgcagagctattagatttggatcctaaagaatttgaaaggccagatttccctctcatgttgtccggcgctaaacctttaccaggagcaatgtcttatgctcaatgctatggaggacaccagtttggcatgtgggctggacaactaggggatggacgtgccattactctgggagaagttttgaactccaaaggtgaaagatgggaacttcagcttaaaggtgcgggtagaactccatatagccgttttgctgatggccttgcagtgctccgtagnnnnatcagggagttcctttgcagtgaaactatgcattnnnttgggatccctaccacgcgtgccctttgtcttctcaccacaggtcaaaatgtcactcgcgacatgttttatgatggcaatccgaaggaagaacccggcgcaatcgtttgcagggtttctcagtcatttctacgc

SEQ ID NO: 627 - DNA, 452 bp, Arabidopsis thaliana
tgtgcttgtgttctcggatgaagtatacgataagcttgcgtttgaaatggatcacatttctatagcttctcttcccggtatgtatgaaagaactgtgaccatgaattccctgggaaagactttctctttaaccggatggaagatcggctgggcgattgcgccgcctcatctgacttggggagttcgacaagcacactcttacctcacattcgccacatcaacaccagcacaatgggcagccgttgcagctctcaaggcaccagagtcttacttcaaagagctgaaaagagattacaatgtgaaaaaggagactctggttaagggtttgaaggaagtcggatttacagtgttcccatcgagcgggacttactttgtggttgctgatcacactccatttggaatggagaacgatgttgctttctgtgagtatcttattgaagaagttggggtcg

SEQ ID NO: 628 - DNA, 452 bp, Arabidopsis thaliana
gggtttgttataaaacccttgattttacttgttttagagaggttcttggtttaaatcttcttgtggtttaagtctttgtggtttctctaatattttcttcccaagatttggatttgctctgttttgtttgtttgtttcagttttaataatggatgatcagagtaatcgtggtaatgataatcataataatgatcatcatcatcatcatcttggtgtgaataagatgggaaaaaacattcgtaaagatccaccaaaccaacaaaatcaacaacaaaaccctcaagctttggtttacaacatcaacaaaaccgatttcagatccattgttcagcagctaaccggactcggttctacttcttccgtcaatcctccgcaaacaaaccatccaaagcctccaaattcacggttggttaaagttagaccggctcctttgacccaactcaaccatcctc

SEQ ID NO: 629 - DNA, 452 bp, Arabidopsis thaliana
acgtacgtatatatatgtactaccatccctagtaacgatatagagagggcactactcttatctaaatttaaagtaaccaacacacatcacgccgtataatcgtcaatacaatctcaaatttttatcatcaccaccacaatgcaatcttcagtcaacaaaatcatttaatagtttcggatctcttgtcaagtactgactggttcgcaagggatcaatgtcatcagatgcaagcaatatagcaaatgagtagcatacatatatgtctatctatacaaaaccaattcaagcagaaacattagattgaagatcgaacaataaaagagaaggcactacgatgtaccgagtgagaaagatctcagaagttttgaattttctgggcttaacacttaaacccatggcaaactgagagcacgatgatgagaatcagtgcgataatgatggcgagcactatg

SEQ ID NO: 630 - DNA, 452 bp, Arabidopsis thaliana
acacgggtgataaagaacaacttgaatcctgtgtggaatgagacgctaatgctttcgatacccgagcccatgcctcctctcaaagtgctagtgtacgacaaggatacattctcgacagatgatttcatgggagaggcagagatagacatacaaccattggtgagtgcagcaaaagcatacgagacatcgagcataaaggaaccgatgcagctgggaagttgggtggcgagcaaagagaacacattggtgagtgatggcataatcttacttgaagacgggaaagtgaaacaagacatttcacttaggctacaaaatgttgaaagaggtgttcttgagatccagcttgaatgtcttcctctcactcaatgatgatactttcttcttcatccctcttctttttttttttctttaaaagatttatttctaaatttatagtgaagaaaagatgctgc

SEQ ID NO: 631 - DNA, 452 bp, Arabidopsis thaliana
acaagaaaaaaatatctgaaaaatgtcagagaccaacaagaatgccttccaagccggtcaggccgctggcaaagctgaggagaagagcaatgttctgctggacaaggccaaggatgctgctgctgcagctggagcttccgcgcaacaggcgggaaagagtatatcggatgcggcagtgggaggtgttaacttcgtgaaggacaagaccggcctgaacaagtagcgatccgagtcaactttgggagttataatttcccttttctaattaattgttgggattttcaaataaaatttgggagtcataattgattctcgtactcatcgtacttgttgttgtttttagtgttgtaatgttttaatgtttcttctccctttagatgtactacgtttggaactttaagtttaatcaacaaaatctagtttaagttcaaaaaaaaaaaaaaaaaaaaaaa

SEQ ID NO: 632 - DNA, 452 bp, Arabidopsis thaliana
cttttttatttttttttttttttttaaacagttcaaacaatttattgataggcttcccaacaattcgataatgaaattacaaagagtaaaaaacagcatttatgtataacaacaagaagaagatacaaagttatataatcatattagtcacctcctccttgagttttgcaaggtcttcttcaggcatcactacacttacaatccttgcaaagttttgcttgggaaaaaccaaaacaacacctttgtctccgaccccatgaatcgtgtagtttacgaaatccggcttccctccgttgatctcaagttcatacatatctatttcatcaagattcacaaacgttaaatttgcaccgtacgtgaaaaaatccgaagagcctttatcttgttctatcatcctcttgatcgcaccgttttcttctcttttttcaccagcaatcagtgcagctagttcg

SEQ ID NO: 633 - DNA, 452 bp, Arabidopsis thaliana
tggtgcaaaaccacttatggtaataacaaacttttttctgtatgagaggaggttttaatcaaatctcaataacaaccctcgtaaaacagtcactaactgatttattcgtttagaattgctgcaaaaataaaaccttcttcaatttgtctttaaaatgcatcaagccatgtcttcttttgagctcgccaaaaccgattaagcaaccacacagaatctgctgccacggcgttcccatcttggttccgattccagctgaagtaagcatgagttctgtttttaatctctagcaacccgtgcccaaagctagcttctcgaaacgcggagtattttggttgtggctgcatcatgtcggtaagcaagccttccgagtttccgccatccccgattgtgatgtatataggagctgactcatccgatattggctcacacaatccattgacaatgttgtaagc

SEQ ID NO: 634 - DNA, 452 bp, Arabidopsis thaliana
tcgagcggccgcccgggcaggtatccatacaatcttttcagtgaatttcttcattgcagccttgaaaggttcattatccgtcctaaaagccataccgggaacaaatttgagccaaaccggaaatcccccaaaattccattcagcacaaacataagggccaattctgagattaacatagagaccagcttggtgcaccaacttgatgaacttaaccaaatcatacctgtctccaaaataatattgtccaggagaaggttcatggccattccaaaaaacataagtctcaataacatccaagcctccttctttggctttctgtattaggccaggccacatctcaggggtgcttcgtggatagtgaatggaaccggagagaaggattcttctttgtccattgatgatcacagctttacgatcataagagactgatgcttttactatacaactcaatg

SEQ ID NO: 635 - DNA, 452 bp, Arabidopsis thaliana
  misc_feature (1)...(452): n = A,T,C or G
ctctcttacccgtcacgtccctacaagatccattatctgagtcaagatccgaccagatcccggagacccgtcggannnacccatcaaagttcatcttgcagtctattccggtttgctcttgatcgctttgtacgtcactctcatcgtcacacacgacggctccaaggctgaaatagcgacggagtcacgtcctcgtatggccggcgtgtcggagaagagcaacgacggggtttggatatcatccgatgatgggaaagttgaagcgttcccgtggaacaatactattttgtcgtggcaacgcacggcgtttcatttccagcctgagaaaaattggatgaacgatcctaatggtccattgttctataagggatggtaccatttcttctatcaatacaacccaaatgcagctgtgtggggtgacattgtttggggtcacgccgtgtcaaaagacc

SEQ ID NO: 636 - DNA, 452 bp, Arabidopsis thaliana
cctctagagcggccgccctttttttttttttttttttttttacaagctaacccttgattaaactaaactaatcgagacagaagtctagttgatacttgataaggcaacaaaaacatcggttgaggttacgtaccaaaagcagtaaattaccggttaatgtatcttaaaaaaacggttaaggagctaagcaatgattgatagtttcagagagacatgagagcaaccacgtcttcaacgttaacctctctttcatctttcttttgccttcttttaaaagcttcgtttgctagattcttcttcttctgctgaagctcaaggaccctctcttcgatactgtttctcgcaatcatccttatcattttaacctcttgtttctgcccgatcctatgaatcctgtccatggcctgttcttcaactgcagggttccaccacgggtcaaacaagtaaaccct

SEQ ID NO: 637 - DNA, 452 bp, Arabidopsis thaliana
cctctagagcggccgcccttttttttttttttttttagacgtttataaaatattttattcttagcttccttgttaccaagtacaggtacaatagcaataagagcaccattagtccttagaatggctacagtgagaatatcaggaaaagagtaaatctgtggaacacagccacaggagtccaacaagtaaaaaataaaacaagcctttttcagctagttcagatttgtttagaccaattctgaacactcccaaccctaggcatcgcttctttcttggcctcagaatccactttaaacgttacaccgcaaacctcacccgaactgtctacccttggtaccggctttaactcatttgatggatgctcatagctcctcaaacctccagatgaggtaaagaaacatcctttagggaatggcgcaaaggatttaccacaacccttcttgacagtctca

SEQ ID NO: 638 - DNA, 452 bp, Arabidopsis thaliana
ggatcctctagagcggccgccctttttttttttttttaatcaactacaagctgattgaaaacaaaacaaatccctcagaatattccgctcagtatgtacaaatatgacaaagtgtttctttagtgtgagagactggttttggacctaagcatcatagtctagctttgtatactcgagcagcatgtgcggggatctatagatcttcacaagcgtccagtatagaacttcttctactccaagctcaccctctgctctagccgcgtacaagtcctcgcatatggctattaatctgtcacacgaaggcaggttctcgtaaggtattctcatacgcaggtcagagcattgaagcctgatgaaacgccccaccgctagtacaaatgtgatatagagtccccatatactgaacttgctgagggtgtcacccagaaagccctgtggcggtgtttcctcag

SEQ ID NO: 639 - DNA, 452 bp, Arabidopsis thaliana
  misc_feature (1)...(452): n = A,T,C or G
ggatcctctagagcggccgcccttttttttttttttttttttagaccaaacaaattagtannnnaattaacattaacaacaacaaaaatccaaaaaaagaaaagaaaagacatcaccaactgtagatagtctcaatccaacaataaagactaagcaatacaatttttttttttacctgcttacatcttctaagtcccttttactggcatttcttataaactggaaacttcaccttcttctttcataattttctcctaactcgctttaccttttcataatttggttatttaacttcaaggtctagctctcttgttactgcaagttgggcatttgtaatgcttgatgtgttctgcttttgcaggtgttatcttcacacattttccatggaaccatttctcacacgcgtcgcagcaaatccagaactcatctgtaccgtagttgtctccacaagc

SEQ ID NO: 640 - DNA, 452 bp, Arabidopsis thaliana
atcctctagagcggccgcccttttttttttttttttatatgtaactcattttttttagcacaaaacaatattttcacaacagcagatgttacaaatggtacaatgagggtacaacatacactaggctactactatatctctttataagcttctacgagaaaaccccattagccaccgattataaacttttgctctctatcttcctcttaccgtaaaagtaagatcagttctgtttttaagtcttacttggcgtcaaacccgtccatagctagaacgtgaagagtagtaaccagtggaagagacagcggaaatgtactgccatgcaaaagcagcaatcaccagaaccataaattgcggctatccacggctttcatggaagtgtatacaagtggcattttcccaaattctgccacaaaccggtttacgcagtgtgttcttttttctgtgtgccc

SEQ ID NO: 641 - DNA, 452 bp, Arabidopsis thaliana
  misc_feature (1)...(452): n = A,T,C or G
tctagagcggccgcccttttttttttttttttgcacgactaaaacaaagtaccactttattcaacttttgacgattttacttttcataacaagttaagaacatctgaaaacatagtaacttttgagaccttattaaaaaccagcaatcatttcaacacccgaaaaactctacagtctctccctcacgctctctaggtttcattcacgaagatgaattcttctgtacccattcaacaagcgtnnnacaccaaacccggtcccagacttcttcttctcgttccacaccggtccagccatgtcgatatgcatccattgcaccttctcactcacaaactgtttcaagaagagagccgcggtgatggatcctcctgcccgcccgcctgtgttgaccatatcagccactccagacttcatcatctcccaatagctctcttccagtggcatcctccaca

SEQ ID NO: 642 - DNA, 452 bp, Arabidopsis thaliana
  misc_feature (1)...(452): n = A,T,C or G
cgatctctcgtgtggaagaagaagaagaacacgatgggaacaatgggtaaagcattctacagcgtaggattctggatccgtgaaactggtcaagcacttgatcggctcggttgtcgcctcnaagggaaaaatcatttccgagaacagctatcaaggcaccgcacactcatgaatgtttttgacaaaacccctaatgtggataagggggcttttgtggctcctaacgcttctctctctggtgatgtccatgtgggaagaggttcttccatttggtatggatgtgtcttgagaggagatgctaacagcattagtgttggagctgggaccaatattcaggacaacgctcttgtccacgttgctaagaccaacttaagtgggaaggtcttacctactgtcattggagacaatgtcaccattggtcatagtgctgttttacatggctgcactgtcga

SEQ ID NO: 643 - DNA, 452 bp, Arabidopsis thaliana
tgggtgcgaataatctaatcccgatggaaatcgcgctgaagattgctaacaaaattagagcaagggaaaagtttgctgcttatattgtcattccaatgtggccagaaggtgctccaacaagtaatcctattcaaagaattctctactggcagcacaaaaccatgcaaatgatgtatcaaaccatctacaaggcacttgtggaagttggtcttgatggccagcttgagccacaagactttttgaactttttctgtcttggaaccagagaggttggaaccagagaggttcctgatggaactgttagcgtatataatagtcctcggaagccacctcagctaaatgctgcacaggtacaagctttgaagagtcggagattcatgatatatgttcattccaaaggtatggtagtggatgatgagtttgtcttaattggttccgcgaatatcaaccag

SEQ ID NO: 644 - DNA, 452 bp, Arabidopsis thaliana
  misc_feature (1)...(452): n = A,T,C or G
cggccgcctcccagagggagtatatataagaacaagaaaactgaaatctttttttgtttcgcacatacaaacacaacaagatctgtctgtgatgcagctcattgcatctgaagaaagaagcaagaaaaaagcaannnaacagagaccacaaggggttgcccgaaaaaaacagaaagaaaaaaacagaccacaagggaaccaatacatagtaaactcgaaagatctgtgattctttcatctttagtgagctcaacagcttcaggctcctgataccttataaagattccccgagtaagatcactaaatcctgagactggtctcgaactaagctctgtcttattattcttcatcttcttcttccccagacgaagcttcctaagccaactccagtggcctgtatgtttactgttttcaacttgagttaccttaaacgcttctgcttctccatctat

SEQ ID NO: 645 - DNA, 452 bp, Arabidopsis thaliana
  misc_feature (1)...(452): n = A,T,C or G
tctttttcacgctaacgaatgaggagcgttgccgccgccgccgctgctgctgctgctgcttctaagccttctaatcctctcgtcgcctttgagcacaagagggatgcatacggatttcctgtcagacctcaacatgtgcagagatacagagaatatgctgatatttacaaggaagaagaagaagaaaggtcggacaggtggagcagtttcttggaagatcatgttgaatcgactgagttacctacaaacggatcttctgaaaatattcacgcaccgtttagtgaaagtgagaaggaaaaagaaaaagaattaaacaaggggcctggtgaagatctgcatactgacaagttaggttctgatgtaactcctgataatgccagtgaagaagnnngacaccccgatgcagagaagaatgttcacagagtgcaattatggactgagatcagaccgtc

SEQ ID NO: 646 - DNA, 452 bp, Arabidopsis thaliana
  misc_feature (1)...(452): n = A,T,C or G
ctccccgatcttcgattcattgtttcagaaatccccaattactgtctctgtgcgtaaaatctctagagaaaccttaaaattttccgttcagagaaattgtcaacgaaggtaatggcgtctggtcctatagctggtggtggagtttcgaagacgaagcataaatggagtgatagtggcaacaaaagccaaaaacgatccaagcccacggtggcgaattcgaattcgcttgggttggaagataatcatcagatgatgaagataagtttaagctcaatttccaagcttgaagttaggaacttgaagcggaaactacaagctgagctnnnnnaagttaggagcttgatcaaacggctcgaaccacaaggtaacaacttcgctcccgtgccgaacaagaagctgaaaacagcaaacggtggtaagaaaggtggagtacatggagctgctgctgataa

SEQ ID NO: 647 - DNA, 452 bp, Arabidopsis thaliana
  misc_feature (1)...(452): n = A,T,C or G
aatgggaagatcaccgtgttgcgatcaagacaaaggcgtgaagaaaggaccgtggctgccagaagaagatgataagctcactgcttatataaacgagaatggttatgggaattggcggtcgcttcctaagctcgctggacttaaccgctgtngcaagagctgtcggctccggtggatgaattatctccggcctgatatccggagaggcaaattttccgatggagaagagagtactatcgttagactccatgccctccttggcaacaaatggtcgaaaattgcgggtcatcttccaggaagaacagataatgaaattaaaaactattggaacactcatatgaggaagaagttattgcaaatggggattgatccagtgacgcacgagccaagaaccaacgatcttagccctatcctcgatgtttctcaaatgctcgcggcagcaatcaacaatg

SEQ ID NO: 648 - DNA, 452 bp, Arabidopsis thaliana
  misc_feature (1)...(452): n = A,T,C or G
gaaagattgaaactttttggtaagataattgtgttgtgtggttggatcgtggaggtgggtcttctttggaatggcgcaacaagggcagggaagcatggaccctgccgctctcgatgatatcattcgtcgtttgttggattacagaaaccctaagcctggtaccaaacaggctatgctcaacgagtctgagatccgtcagctttgcatcgtctctagagagatttttcttcaacagcctaaccttcttgagctcgaagctcctatcaagatctgcggtgatattcatggacaatactcagatctattgnnnctgtttgagtatggaggcttcccacctacagctaactatttattcttaggagattacgtagacaggggcaagcagagttnggagactatttgtcttctgcttgcttacaaaatcaaataccctgagaacttttttcttctaa

SEQ ID NO: 649 - DNA, 451 bp, Arabidopsis thaliana
caacaagaaattgttacacttacaaaaatctattagaccgtaaataccaaggtgtaggctagcgagaaggaggagaagagaagaaaatgacaaggaaataaacgagaaaaccagccacaagtattcctccgtacaccaacgtttggtaagactttactccaactgtgtatttgtactctatcttacagcatctcatgttctccctttctgtttccagtacatgttctacgtactgttgtgtaaacatggtggtttgaagaatctctgagctgttgaggtgagcatcgtatagcttgtggtcgtatagcaaagaagatagatccaccagttgttcttctacagtgtctagatatttctctaatctttcgactagctcgtgtgggaaaggctcaggcaatgttgttgtctttttgtagaacttctcgacccatagctccgttttggttttgtt

SEQ ID NO: 650 - DNA, 451 bp, Arabidopsis thaliana
caaatatgtctttgtttcatcattttcttatacctctggccagaaggaaatttcatcaaagtcaccaaggcagatcgctcggccggagattggtgcgttgctaaaccttctacggataacgaaaggcttcaagaaaacataaacttcgcgtgttcgaaaatcgattgtcagattatctcggaaggaggtgcatgttatttaccagatagtatcattagtcgtgcttctgttgccatgaatctttattaccaagctcaaggaagacatttttggaactgcaattttgaaggctctggtctcatcggcataactgatcctagctatggaagttgcatttatcaatttcgtaagtaaaacatatcaaggttcgatcttgttgcaagaagttagaggactgtatctgaaatttcctatttaaaatctaatgtttggatgttttaattggatttct

SEQ ID NO: 651 - DNA, 451 bp, Arabidopsis thaliana
cttatctccaccatgatctcactccactcatcagccattaaagcctctctctacggctctttcccttcttcgttacgatcaacactctctgtttccttctctgctggatctcttattcggcttccttccgtcggcaagcgcaatctctccgtcgtcgtttcctctggaagagactcctcgatgtcatcaaacaatgtttctcgcggatcgtcttcaaaggttgctgctgaatctttcttcaggagtgtcttagggcagatggaaactgtttacctaaatcgaaacccgacgcctaaatccgtcttggagcttgttcgatctgttgatgaccagcaactttgctatgatcatctcgctttcagaacgtttgggattggtggttatgggattgactcgcttgcaagctttttccttgactatggatatacaccgatggatgagctaaaatttc

SEQ ID NO: 652 - DNA, 451 bp, Arabidopsis thaliana
cctttgaccgatcctttgccgtcttatggaagaggacgggagcatcctggacgaagatatatcagctttattcacggagacggactcaacgacgttgttattacaggcagaaatgggacgattgatggccaaggagaaccttggtggaacatgtggagacatggaactctaaagtttaccagacctggtctcatcgaattcaacaactcaacaaacatcctcgtctctcatgttgttcttcagaactcccctttctggacacttcatccggtttatttaatgttgttgttcatcatgttactatcctcgctccaactgattcgtacaacaccgatggaattgatccagattcaagctctaacgtctgtatagaagactcctacatatctactggtgacgaccttgttgcggtgaagagcggttgggacgagtatggcattgcatacaaccg

SEQ ID NO: 653 - DNA, 451 bp, Arabidopsis thaliana
tttttttttagccgaaggtaatttgctggaaattggagaacgttggtgagaagaacataaaccaaaaacaaatcccaaaagtacaccactatataactaaatgtctcatgatttcgtaatctcaggtcttaagagtaagaaggttgcaaaaacaaacaagatatcttccattgcttcataatgcatctatctcaccgcttcaacgctgaaaattgaaagagtcatttagaaatcgatcttgagctcatctttggaatcggagaaataggagaggacgtagggagcagcacggataatgacaacccagctgccaaaaagagcgacatgagtgcgtagctgcttcagagcctcggctttgtctggctttcgcatgaacattcctgggaacatggctgcgatcttcttcttcctctctgatgtgtgaatgtgattctttaaagcggacgcgtgg

SEQ ID NO: 654 - DNA, 451 bp, Arabidopsis thaliana
  misc_feature (1)...(451): n = A,T,C or G
caagtgaagaccggtttgttcgttgggttgaacaagggacatgttgttaccagacgtgaattagctcctcgtcctcgttctcgcaaaggaaaaacgagcaagaggacaatctttatcagaaacttgataaaggaagttgctggtcaagctccctatgagaagagaatcactgagcttttgaaggttggtaaagacaaacgtgctcttaaggttgctaagaggaagttgggaacccacaagagagccaagcgaaagagagaggagatgtccagtgttctccgcaagatgaggtctggcggtggtggtgcaactgagaagaagaagtgaacgtcatcttaagtttgtgaannnctcgtaaagagttatggtttcttgttgcaaaatcgttattatgattcctaagcttctcgaattatgttttgttagaatatcggacttaaagagagttttg

SEQ ID NO: 655 - DNA, 451 bp, Arabidopsis thaliana
ggagactcggctatgggaagaaggcgctcagaaaacagtaacaatgaggaaaaaggaagggcttgctgattaccgctactttccagaaccagatcttccagaagttatccttacccaagaatatgttgatagcattcgtgcttctttaccggaactccctgaagcaaagcgcaggagatatgaggcgatgggtctaggcatgcaagatgtgcttttcctcgcgaatgacgtcagtgttgcagaatatttcgatgcagtcattggtaagggtgctgaagtgaagttggcagcaaattggataatgagtgatattgctgcttacttgaaaaatgagaaactttctatcaatgatattaaactcactccccaagagttggctgaactgatagctgcaatcaaagatggaaccattagcggaaagatcggaaaagagatactgtttgagctatta

SEQ ID NO: 656 - DNA, 451 bp, Arabidopsis thaliana
ctttttttttttttttttttaacttcctgaacttagatattcactacaataagtctttaattaaacaaccgaattgttaagggggacaaaagaatattcaaaccccaacaggcaaacaaggctggcgataatagtcacaaaaaacattccaagccttagtgtcgatgcctggcttaaaagccgagagagatcctaagctgaaagtcagatagcctattgaactactacttacttactgagccaagtagggccgctcatttaacagaagaacatggagttggcgacgttgtctttgagtcttgggagctgtgcaacagagattggtcctggagctgtgataccaccatggcttgatgatgtctcagactgatcttcaaacttcatgaacgtcccaagctgagcagctgccaagtgagcatagcagatcggcgcaacaacagaaatggcactg

SEQ ID NO: 657 - DNA, 451 bp, Arabidopsis thaliana
  misc_feature (1)...(451): n = A,T,C or G
ttttttttttttttttttttttttcatggaaccctagctagtagagtagaggactaaccttattaccaagattttttatttacatgttgttacaacttacaaatgaataaaagataattaatgcaaatatagtcttgttaatgccaaagttttgtttcatgaaataaacacgcttctagcctttcatgatcaccctctttgtctctttatgtagtttttttttgtcgtttcttattgatgtgtgtttcttctcctctctctcataagtcataatacacttaatatgtagtcaataatattcctagtttcatacattcttgtttgcaattctttaattttttttgtcaagagtttgtaatcnttatatctatgagattatgtacccaatcaatcatcattcggagaggccacaaagaacaaacccgagtccgaaaccgatttgatcgatcat

SEQ ID NO: 658 - DNA, 451 bp, Arabidopsis thaliana
ttaagtctaaagttttgaagtgaagtttattacattttacgaataggagttgctaccaatttcacatgagagatttaacatttacattcactactctcaaaaaggtacaaatgtcaaggaggactaaactcaagccttgaggaaatggtatttggattcaacgtaactctctgaatcccataagaaagacccaaaagccacagcttccaaaaccaacatcgcaagtccagagacactcagagacagaacctcgtcgttagaagtatcgagctttccatcctcgagtatccttatatccggtcgtccaaagagcgcctgagtctgcttctcaatcagagtcatggcttctttagaacgtatcgtggcatatctctgaagcgtatccgagtccaaatacgtaacatatgatctcaatccataagacgatgactcatcttcatttctttgtatc

SEQ ID NO: 659 - DNA, 451 bp, Arabidopsis thaliana
aatcaaaattcatcaaactagacattacacaaaatcaataacttataacaacacatgtttaacctgtttttgagtctcttccacattaccatcacaccaattctcagccacaaaaccacaacggaacagagacagacagagtgagagaggaatcagatgaattggatgttgcactttgatgaagctatatcaagagtcataagttcggtgcgcaagtgctcactatcgttgtcttcttcaacaccaattttcacagtttcaagatatttcaattttctcaagaaatgctccatttgtttcacctctctaagacttcctccatagcctgaaatttctagcactttgactcgacatgtcgataaacaacaccttccttccacctcagaagtaggactgtcgtcttcataacgtttgtataagtaccttttcttaggcttgctagtgcaagcgc

SEQ ID NO: 660 - DNA, 451 bp, Arabidopsis thaliana
gacagaccgtttggttgagaaaaggaaacctataaaaagatttgtttccttccagaaagaggaaagttgcattaccaatggagagatatctctcaggagtgatgcagatatcagtgattctggtgaagatgtgtgtatttctgataatttttgggagaataccctgtcaagggtttgtagtagtagtagtaataggagtatcaaatttttggggactgatagaacacttggagtagaggaatatttttcagcaaaactgtcagtttccagctctcaagaaacttgtaggacgtacatgaattgtgatcttatactacagaaaggttccacatacaagcaacgggaagcagtgttgctgctgagtagccaggacaagttgtacgtgctactcgtgggtgtgactactgattatgaagggagtaccttaagtgtactgtgttcccatgaaatc

SEQ ID NO: 661 - DNA, 451 bp, Arabidopsis thaliana
gcggccgcaaaaatcatatcgaatttggttatcctctttcaccaaaaccaccgatcatacctgattaatcacatttggttcattgagcatatcaaattattactatagttgggcctaacccgcaactgaaaatctggagaagatttaacgaataaaaaagagtggtaaaaccgttaaagtattttctttcagctcatctcatatccaccagaaattaaaaatcaaaagtttaaaccaaagtcatcttgatttggcttgtcgtaggcggctttacttccttctccctctcaatccacatctcctgagggcttctacatgtgaatgggcttgtcataggtagccatggcagcttccttgatagcctcactcatggtgggatgagcgtgacagactcgagcaatgtcttcacttgatgcatcatagttgatagctagaaccgcctcatggatca

SEQ ID NO: 662 - DNA, 451 bp, Arabidopsis thaliana
tttttttttttttttttttttttttttttttttttttttttttttttaacaaagatcttttcattcacacttttttcgaaacaaaagagagggaacaacacttttgccattccctctctctcccgtggaaaggagctgaattacaaaagaaaagccgatttggctttatcttaatgatgatgctctcactttgcctttgggggctctctatttacattcttttttacatccattttcccatatctctaccttccctagagacacacaaaagcttaaaaaacacagcaattttcacacacacacacagaagttcatctttatttagccactcttcttcgagcgccaacacaagcttcttcctaaaccttccttatgatgatatctgaaacctaatttactttcaccgaattcaatccctaaagatcacagcatctgcaatctccataagcgg

SEQ ID NO: 663 - DNA, 451 bp, Arabidopsis thaliana
gtggatattgatgtgtcctgactctaagactagattatggtttgttaggaaccaaaatatttgtttaaagaaaagtatagttagttgatattgaaaaagaagagcataggcttttaattctataagagagtgtactttataatgaagggaggcactaaccttccttcccttgatatatatctgcaatgagctttgtctggtagtgcttcaattgagtgaaaacaatggtgctagggttgccatgtggtgaaacttactccttctcttcaattatatgaggcttcctataggctccggcttttcctatatcagagagtaaattggtgaagtggattggatcacataaggtacgtaactagaagaagtaagtgatctttttgtgtctgtgcatataagctaattttgagaccttggttttgttttcctctttctgttgcgtgaagccatggag

SEQ ID NO: 664 - DNA, 451 bp, Arabidopsis thaliana
  misc_feature (1)...(451): n = A,T,C or G
tttttttttagcgaatgggcttccaaccaatattgggccttgtgattaagccaatacatatcaatgcgacaatgcctaagattgatagataacgagtacaaagacttcacttagcggttctgaagcatacgggtggtgtcccgcgtgttgcttcttgatatttccatggacgtctcttctccatcaacgtacgctctctagctctgtttgcctcacgcttagatgattcattcctgctgaatcttggacatcatttcttgagtctgccagcatctggaagtaggcatgaggtccccaaccgtctggatcgtatggaggagggaaaaattgcagataacaaaatgtggccacagtcaatcctatgatagctcctccaaaaacatcttgncagtgatgccnatagtcatcaactctggatacaccaaccaatgctgcaaccagtagaggtaaa

SEQ ID NO: 665 - DNA, 451 bp, Arabidopsis thaliana
  misc_feature (1)...(451): n = A,T,C or G
ttttttatcaatacatatatatgtattattctttattcattattcatgacatgaacagattaagtattacatgaacatattgagtattacatatattcacccgtgaatatatttacccattattcactgacatcaaatgaaaagcattcattaagacattaacagacatagaaaatcattcaggcannaactaaagttagttggtatcaccaaaataaagtttcttcatagtagccatctcacgcttgaattcaaccattgcgtctcgtggcaactttatgatcactttaactccaccttccattgatggatccgattttgaaggtttcaagatcatccctacgtgcactgtgctctcccgctgggtcaatggtcgtaaattcactggctcattccaaccgaaatccattgatccgaaccaaccaatattcctccaatccgtcaagaaaaa

SEQ ID NO: 666 - DNA, 451 bp, Arabidopsis thaliana
cctctagagcggccgccctttttttttttttttttttttttaagctcgtaaaaaactcactaatcttgatggatgtcttaagattatcaaatcacatatactctgagaatatgacaaactacataatttccaatcgtaagaaaaaccgtaattaaaattttcttaatctccttgttagatacagaatttactaaccaatatattctcctaatcaaacatgctctcttgattttgtgagagtgtgtgtgtagctctctcctacaaacctgactctgatatcgatcagtgattgcaatggcaacactagctttgagaaagtaagcgatcaagctcatcaaacccatcatcttcatcatgttccacatttgtcaactgttttggtgtcgtagtaaaaccatcaagcttggtttgttcataaaagtaaagtctttgtgaatcccattcctctttc

SEQ ID NO: 667 - DNA, 451 bp, Arabidopsis thaliana
  misc_feature (1)...(451): n = A,T,C or G
cctctagagcggccgccctttttttttttttttttttttagtaataaaaaaaaactatgtgctttttttttatatatgcctccaaaatcccaatcggagaacataaaaccccccaaagggtttctgtgttctgtctgaaatgaaataaaataaagaaaacccgaaatgggtttagtcttttgtcttgttggtcttatggatgattannncaaaaaaaaagaatgatgatgatgatgatgaaatgcaaaactggagatggcagagattggtctctcttaagacatgaactgactaatgagagtcgaccagactcacctctacaagcctctctacttttgaggaatataaagaggcttatgaaaaaatgcagccaattgagagcgccaacgattggtttttcaaggactgagccgtggataaaatcaggaagcaaccgttgcagaagattgct

SEQ ID NO: 668 - DNA, 451 bp, Arabidopsis thaliana
  misc_feature (1)...(451): n = A,T,C or G
tttttttttataaaagggatgcatgtgtattcaacagatacatgtgacaaaacaatttcaaccaactggaataaacttttcaacttttttttgtttgnttttgttaaagaacaaaaaaaggaaaggagaaggatcaagaaatatctctctccaaaccccaaatcgaaaaagtataaaagaattggactctttgtaatcgacttatgttctcttttcactgcacataagaaaaagaaaggtttttcatttggaagccctgtgagctgatggcttggattgagttgaagttgctgctgatgacattactcgtaagcgaccagctatctctgtgaaagatggtcttgccattgggtttggtgcccaacattcctccattagtgttctccattcatcgtcacagaagcctggtatggttggtctcagtgtgttgttcactatcccacctattatt

SEQ ID NO: 669 - DNA, 451 bp, Arabidopsis thaliana
ccacgcgtccgccactggtcgttcaaaaatatataagaaaatattaaacctctgtttttgctggcgatcatggcttacacaaacaaagttacgatatcagccgcggttgcgacaatgatgctgtttctggcggttacgatcgtggatgcacagtcaatgccaccaatgccaaagtttaatcctgtgtgcgcgttggcggatctcccaaacatcgtccaactttgctactttaacttggatttgacgccatctgaagagtgctgcaatgatctcaaatcgtcgagcacgatacaagtgaattgtctctgtgacaatttcattgcacatccttccaatggcaatatctcgcaagctcgctacgacctggtcaacagcgcctgtggtgttgccgacaaattcgcatgtaaaggaggagacgccagcggaggatcaacgaacaagattgctgcat

SEQ ID NO: 670 - DNA, 451 bp, Arabidopsis thaliana
cattcgcttattatttatccatatgggaaaggttcttgagaaggaggcgtttggattggctgcgaaagacgaatcgggaattctttcgcctttcagtttctctagaagggcgacgggtgaaaaggatgtgaggttcaaagtcttgttctgtggaatttgccacactgatctgagtatggccaaaaacgaatgggggttaactacttatcctcttgtccctgggcatgagattgtgggcgtggtgactgaagttggagccaaagtgaaaaaattcaacgctggagacaaagtcggagttggctatatggccggctcgtgcaggtcatgtgacagctgcaatgatggcgacgagaactactgtccaaagatgatcttaacgtccggagccaaaaactttgacgataccatgacccatggtggatactccgaccacatggtgtgtgctgaggat

SEQ ID NO: 671 - DNA, 451 bp, Arabidopsis thaliana
ttggaatcctaattcttcaggactgtgctgtgggtttgctgtttgctttgcttccagttctcgagggaaattctggcattgtccgtgaaatgttgtcaataggaaaagtggtggttttgttgctttcgtttttggctgttttgtcaatattatcacggacatgtattccttggttgctgaagctaatggtcagcttatcgtcacagacaaatgaactctatcagttagcggctgttgcgttttgtctacttgtagcctggtgtagtgataagctgggattaagtcttgaattgggttcttttgctgcgggggtcatgatatccactactgatctcgctgaacatacattggagcaaatcgaacccatccgtaatttatttgctgctcttttcctagccagcattgggatgttagttaatgtccattttctgtggacacatgtggatatact

SEQ ID NO: 672 - DNA, 451 bp, Arabidopsis thaliana
cggccgcaagaacctcaccgacgattccataccaaacaaattcccgatctggaaacaactgacctgtgaaggtgaagtgtatcgctggaaatggcggtggccttccgtggaggccggggaggcgtcggatccggccaatctaccggacttcgtagtttcttctcctaccggatctttatctccgctttgttctcttttctcttcctcgccactttctccgtcgttcttaactcctctcgtcatcagcctcatcaggatcatacattgccgagtatgggcaacgcatatatgcagaggacgtttttggctttgcaatcggatccattgaaaactaggttggatctgatacacaagcaagccattgatcatttgacactggtgaatgcgtatgctgcttacgctaggaagctaaagcttgatgcttctaagcagcttaagctcttcgaagatt

SEQ ID NO: 673 - DNA, 451 bp, Arabidopsis thaliana
gggtgatgaaagattttgtgttgatcctgttgaaagtaaatctcctgcttctgtttattcagggaagccaaaggaggagaatcttctacaatggggacttcaaccgtttggtacctcggttagctctgctgttgtcatgcataccaagaacgaggagattatgagggtttgtatcagaagaggaggtgttgatctggggcaaagtcatgaacgatggctctcaacagtatcacaagcacccaacgttatatcgatgtgttttgttcctataacttcactcttgagcggtctcccaggaacaggatttcttagtcatgcagtgaacttatacctccgatataagccacctatagaagagttgcatcagtttcttgagtttcaacttccacgccaatgggctccagtgtatggagatctccctcttggactacgccgctcgaaacaaagttct

SEQ ID NO: 674 - DNA, 451 bp, Arabidopsis thaliana
  misc_feature (1)...(451): n = A,T,C or G
ccccaccggtcttcaagtattaacagtagtagcaacaacaacagtggttcatcaaccgatctattcatttgtttcacatctcgtttctcttcttcttcctctatgcgtctctcttctaaatccatccatagcccagctcgttccgcttgtctcaccacttctcttagccgtcgtctccgtactagcggtagcttgaagaacgcttcagctggagttttgaactctcccatgtttggtgctaatggaggacggaagagatctggatctggctacgagaatagtaacaacaacaacaataataacatagagccgtcgtctccgaaggtgacgtgtattggtcaagttagagtgaagactaggaagcatgtgaagaagaagatgagagctagatctagnnnnaaaggaggtgagaatagtttcaggagatccgttgatcaaaacgacggtggtg

SEQ ID NO: 675 - DNA, 451 bp, Arabidopsis thaliana
cggaatcgtaactgactcggaagccggaccggagacttctcttctcctcaatcctcacgaaggatctaccaaaaaagctccttctgattcctaccacttcgcttacatcatctacttcaccctcggcgttggctttcttcttccatggaacgcattcatcaccgccgtcgattacttctcttacctctatccttccacggccgtcgatcggatcttcgccgttatctacatgctcgttgctcttgtttgtctattcgttatcgttgtcttctatgcacataagagcctcgctagctttagaatcaatctcggtcttttactcttcgtaatcgccttgcttgtggttcctgttttggatctggtttatgttaaaggacaggtcggattatacgccggattcgatgttacttccgccgccgttgccttatccggtctaggtgatgcacttatg

SEQ ID NO: 676 - DNA, 451 bp, Arabidopsis thaliana
gaatgatgagcgaggtgagatttataccggaccggaatatacttcgacggattggtctttgacgagtctagtgatcaggtcaattgaatttcaagttagtttgatgattacctttataaggtttcctccatggttaattagtaaatgtttgagctttgtttttgatccgtatcgaacaatgaggcgtggtagacgctatttagtatcgtggattgttgggttatgtgattcagggttaaaagatgataagcctgtgttggagcttgtgcgtagagtaacatggggtttgttttgtgctgtttatgtggggatcatgttgtttgccttgttggtttctgcgtttatgattagtggttttgtgattacctatttggctcatgaaccacttgttatcaaagagagcttgaattttgattacaccaagagtagtcctgaagcttatgtgcccata

SEQ ID NO: 677 - DNA, 451 bp, Arabidopsis thaliana
ccttgtcgaatctttagttgatgttgtttaaaggttttagctaataagggcatgaaacggatctgctcggtttcaagtgttcaacttttttccagaagtttcagagctttagcatcgccacgttccttgaactatcccctgcagtgtatcaagcgttcatcagttcggatggagagtagcaacttttcttctggtgtcagaaccgagagtagtgtgaagccaagaggagcattgatagttctagaaggtcttgatcgcagcgggaaatcaacacagtgtgctaagctactctctttcttgaatggtttaggacatccgaccgagctctggagattccccgatagagagacgagtgtcggtcagatgatatccgcgtatctttctaataagtcgcagttagatgatcacacaattcatctccttttcagcgccaatcgttgggagaaaaggt

SEQ ID NO: 678 - DNA, 450 bp, Arabidopsis thaliana
cgaaattacagcgttcaaaaatcaattgaaaaattgcttgaagtcactgatcttactcttttgcttagatctccaagaacttgttcatatttgttccagaaacatatgcattgcttgtttggattttggttcatggaactgttctctgcagcttcacagaagattactacagcgtcaacattccctctgacttgttcattttggttttggttgtgtcgactggttcgttttcgggaataatagttttcttatttgtccctctgcgttttcttctgatgttgcccttgtcgagaatgcaaatcgcaatgactcaatctttgctcctgcgcaaagcctgaggtcaaaacctagggaatctatcccaatcagcttcacttcctctgcttgaatactgttatgtctccaacacagagatttgagtgcttcagttattttatcaccagattcttc

SEQ ID NO: 679 - DNA, 450 bp, Arabidopsis thaliana
tttttttagagtgattcggttaatctttttaagcttttgtaacaacttatcaggattcagctgagtgttcctcgaaagtcactttaagaatgaaaaaaattgatgtttgtttggtatcaatcgtccatgttcttcatgtactccttggaaagctttgtttccataataagtttctgttcatttatgagtgagtaccctgattccagcaatgcttccaccgtttgctcaggggcagtgaattgaggaacctcttgggtctttttacgtctgagaagaactttccctagagtctccattcctccagcttcatctacccacttgaggatagacctatcatatgtgcgtgacctcaaagctccatagaagtcaagtgcttgatttggaaacttatctacaatgcttataacatctttccgcgatataccatctttctcgtacattctgctaaca

SEQ ID NO: 680 - DNA, 450 bp, Arabidopsis thaliana
tttttttgttttgttccataacattttcatgaatgccacgatataatcagatattagttacagaattcactccatagagaaacaaacatcagattattttgtttgagggaatacaaattcctggtgaagcttttactttgttacacgaaccgaatcaaaaacacctagtttctttatttgttgatttttagtgcaataaacttttgtttggctcctctattgctcttctcttaaatctctgtaatactcactgatccatttctctataatggcaacctcttgcctcctctgctctttcagccactctgggtcatcttttgtagcagccctgagatctgcatggtgagctcctttcttggtcacaagcgcaacgatgctacttgaaatgttcttcagaacccctccacggctccaagggtcctgcattccattggagaatatgatgttgct

SEQ ID NO: 681 - DNA, 450 bp, Arabidopsis thaliana
tttttttttttatttttagaaattctaatttttgtatgatttatagatttttgtatttgtccaaataaattttggtatttttgtcctaaagcatcgttcattgatctagagacagctaaagctaatcaaataagaaactccacaattaatagcaactggaggaatcacaaatagttgtatcgaatttgataatttctaagccaatcttcacctttctcgtcgtaatccatcttagtaaaggcattccccaagaagttcaaattagcagcaaatgcagatgctcctcgccatgcatccagcactggatccatagctctaaccacgttaatgggtgatccgcaaggtcttatcatcctaatcccacattccaaccgctcgttcatccctggaagaaggctacacccgcccgtcattagtatcgagctcgttagcctctcctctaactctttc

SEQ ID NO: 682 - DNA, 450 bp, Arabidopsis thaliana
cgagcggccgcccgggcaggtcatttttgagatcagagcttctagcagcgtaaaaaatgcagacgaggtatatggagaggactaatagtatgagagagaagagaaaattggaggaagatgataatcagcagcagcagcgacagcctgagcgtaaaaggccagctcttgcaagtgtaattgtggaagccttgaagatggatagtttacagaggctttgttcttctttggaaccgattcttcgccgagtggtaagtgaagaggtggagcgggcattggcaaagcttggccctgcaagacttagtgaaaggtcgtctccaaaacgaattgaaggtatcggtggaaggaatttgcagctacaattcaggtctagattgtctgttcctttgtttactggagggaagatagaaggggagcaaggtgctgcaatccatgttgtacctcggccgcgac

SEQ ID NO: 683 - DNA, 450 bp, Arabidopsis thaliana
tcgagcggccgcccgggcaggtacatataaagtaaatttgttgttaaaaacctttaaaacttaaaatgtaaaattttataaggagaaaatcggaaccctaagagttcgcaacggttcccttaacgagctcaggcgacgacatcatcttctgaaactcctcgaaattaacatttccatcgccatcagtatcaacatgaccaatcattctcacacaatcttcaacagagcaagtcataccaagacgattcagaactttatggatctcagaggacgaaatcaaaccgtttttattctgatcgtagagatcgaacgcttcacggatctctacagcggaggaagatgatcgacaaatggtagcaaactcttcttgattgatgaaaccgtcgcagtcgatgtcgatttcgtctaatacacggtttagctcctcctcagtgtacctcggccgcgacc

SEQ ID NO: 684 - DNA, 450 bp, Arabidopsis thaliana
ctgtatccaaacttgagaggttctgtgatgtatataatgatgacagtgatggtgatgatgctgcagaaacaatggagaattacggtagtcgccatttatgcattcagaaagagatgacacctgatagtatacgtgcaacaaaccttcactctcttttggtttgctcttctgctaaacacaagatggaattacttccaagtctgaaccttctgagagccttagaccttgaagactcttccatcagcaagttaccagattgtttagtaactatgttcaacttaaagtacttgaatttgtccaagacacaggtgaaagaactgccaaaaaacttccataaactcgtcaatttggagacgttgaacacaaagcactccaagattgaggaacttcctctagggatgtggaaattgaagaagttgcgatatctcattacttttcgccgcaatgaag

SEQ ID NO: 685 - DNA, 450 bp, Arabidopsis thaliana
acattcatcttcttcttcttcaaacaaaaaatgggtttcttaaagttatctccaatgatccttctcctagcaatgatcggcgtttcatatgccatggacatgtcaatcatctcctacgacgaaaaccaccacatcaccaccgagaccagccgtagcgactcggaggttgagagaatctacgaagcgtggatggtggaacacgggaagaagaagatgaatcaaaacggtcttggtgcagagaaagatcaaagattcgagatctttaaagataatcttcgtttcatcgatgaacataacaccaaaaacctcagttataaacttggtttaacccggtttgctgatttaaccaatgaggagtaccgatctatgtaccttggtgctaaaccgaccaagagggttttgaaaaccagtgatcggtatcaggcgcgtgttggtgacgcgcttcctgat

SEQ ID NO: 686 - DNA, 450 bp, Arabidopsis thaliana
attacttgctttcctcttcatcacttcctcttccgctgagctcatcattaaacaggtcacacagggcagaggaatagagtacaacaactcttacagtctcacgtcgaatcttggagtgacgacaagagagttgagagacgagcgaccatcaagtaagatagtgacaatcacaagcttctctgtgattaaggacagaggagaaccctatgaatcatctatttttgaggctgccggttacaaatggagattagttttgtacgtgaagggtaatccgaaaggcggtataaataatcatatttcactttacgcgaggatagaagagacagaaactcttccaagagggtgggaagtgaatgttgatctcaaactctttgtccacaatcggaagttaaagaaatatttgtctgttacagatggaacagtgaagcgatacaacgatgcaaaaaaaga

SEQ ID NO: 687 - DNA, 450 bp, Arabidopsis thaliana
ccacgcgtccgaaaaaaaaattggagaggaagagaaaggaggaaatcgaaaccattcggttggtgatgggccaagcgccgtcgtctacggcggaatcgaacggacgagagttagatttgaggttatggtctccggtgattgttgctggaggtgaatcgatggctgtggggaatgttgtggatcgggatttcaccggagatctgccggatgagtgtttagctcatgtgtttcagtttcttggagctggagatcggaagcgatgctctcttgtttgtaaacggtggttgctcgtcgacggtcagagtcgtcatcggttatctctagatgctaaggatgagatctcctctttccttacctctatgttcaatcgattcgattcggtgacgaagcttgctctccgatgtgatcggaagtctgttagcttgagcgatgaagctttggctatgatct

SEQ ID NO: 688 - DNA, 450 bp, Arabidopsis thaliana
tgaaaactcgggaccaagaatggtacttcttcagtgcgttagataagaagtacggtaatggtgctaggatgaatcgagcaactaacaaagggtactggaaagcaactggaaaagacagagaaatccgccgggatattcagttgctcggtatgaaaaagacgcttgttttccacagcgggcgtgctccagacggccttcggactaattgggtcatgcacgagtatcgccttgtggaatatgaaactgaaactaacggaagcctgctgcaggatgcatatgtgttgtgcagagtgtttcacaagaataacattgggccaccaagtgggaacagatatgcgccattcatggaagaagaatgggctgatggtggaggagctctgattccaggaatagacgttagggtcagggtagaggctctaccacaagccaatggaaacaaccagatggacc

SEQ ID NO: 689 - DNA, 450 bp, Arabidopsis thaliana
cttcttcttcttcccctctttcattttccagccactacaaacttttctatctctactttttttcctctcgatttcaggtagaagaaaatggctgatggtgaagacattcaacctcttgtttgcgacaatggaactggaatggttaaggctggttttgctggggatgatgcacctagagctgtgtttcctagtattgtgggtcgtcctcgtcacaccggtgtgatggttgggatggggcaaaaggatgcttatgttggcgatgaagctcaatccaaacgaggtattttaactctcaagtaccctattgagcatggaattgtcaacaattgggatgacatggagaagatttggcatcacactttctacaatgagctccgtgttgctcctgaggaacatcctattctacttaccgaggcaccgcttaacccgaaagctaatcgtgagaagatg

SEQ ID NO: 690 - DNA, 450 bp, Arabidopsis thaliana
  misc_feature (1)...(450): n = A,T,C or G
tagccacaattattagttttcgttatccttcatcctcttacattcgttgactaaaacatatgattcatcatgcctcggttggatttgttattcaacttattattatagacatatattactttattcacttgatactttatcgacactggtgtttcatcctctctacggtcaaaggagtgtgcttagtagcgttttgagatacgcggtaccgtagtactagtgtctctaccgtcatggtacagccgcagaatcacagccgcggtttcttcaatcgccttattcgtcacatctatcactgcccatccggggtttcgctcatagatccttgacgcgaaatctagttctttcnnnncaagatcaatccccgagtaattgttctctgcctctgtatctacgcctagcgttttaacccttgttcttctaatcgcttgcagtacctcggccgcgacc

SEQ ID NO: 691 - DNA, 450 bp, Arabidopsis thaliana
  misc_feature (1)...(450): n = A,T,C or G
ccgggcaggtccatctgtttttttttttcatctctctctctctctcttttcttcttcgattcgtgttttctccatttcattcnctgttacgcttcaatcgaactcggaagtcatggctatggccacaagggtgttggctcaatcgactccaccgtctttagcttgttaccagaggaatgttccttcacgtggatctggaagatcgagaagatcggtgaaaatgatgtgtagtcagttacaagtgtctggtttaagaatgcaagggtttatgggattacgtggtaacaatgctttagacactcttggaaaaagtcgtcaagattttcattcgaaggtgcgacaggcaatgaatgtgcccaaggggaaagctagccggtttacggtgaaagcaatgtttgaaagatttacggagaaagctatcaaagttattatgcttgctcaggaggaagc

SEQ ID NO: 692 - DNA, 450 bp, Arabidopsis thaliana
aatacctttccaaataacaattattatacaacatcactttgtatattttcacaaaacgaaaaatagcaaacccaaatattctcacaactacatataaaaattatcttaagtgaagcaaaagtttgccggtgtagtttaactaaatttgatattttttcttcgatttgtccgattccactgataaaataaatcacgatgaagctctatccaccaagtcaattcggctggaaagaactcgctgaactaatcccgatcaaaataaccgatataaccaactaaccaactaaccaactataccaataacatgaaccaatcttcggttgacaacataccgaacacaaccacaaaacaaaaaagcacactcaaatgccgtcataccttactaaatcaattgcggttccggttcatgagaaattgcttggttaaaccacaacccaacgcctcatcagg

SEQ ID NO: 693 - DNA, 450 bp, Arabidopsis thaliana
ccacgcgtccgcaagaaacgggtcggcgacgtgctcagcgatgatcagatcaaggagtgtgaggaattagggattcttgtagacagagatgatcaagggacgttgcttcaaatcttcacaaaaccactaggtgacaggccgacgatatttatagagataatccagagagtaggatgcatgatgaaagatgaggaagggaaggcttaccagagtggaggatgtggtggttttggcaaaggcaatttctctgagctcttcaagtccattgaagaatacgaaaagactcttgaagccaaacagttagtgggatgaacaagaagaagaaccaactaaaggattgtgtaattaatgtaaaactgttttatcttatcaaaacaatgttatacaacatctcatttaaaaacgagatcaatcaaaaaatacaatcttaaattcaaaaaaaaaaaaaaa

SEQ ID NO: 694 - DNA, 450 bp, Arabidopsis thaliana
  misc_feature (1)...(450): n = A,T,C or G
ccacgcgtccgatcgatctcctaatccagttattgttctccgtggatctgctgctgctccttcttctgatgttgtttccgaaggtttagatcgatctgcttttcagatgtattacgatgatggtactgattctggtcttagacctttaccaccgagtatgactgagtttttgttaggttctggatttgatcgtttgttagatcagatctcncagatcgagcttaacaccaatcggaatcttcgttcttgtgaacatccaccggcttctaaatcggccattgaagctttgcctctgattgaaatcgatccgactcatctcttatcggattctcaatctcattgcgctgtttgcaaagagaatttcgttttgaaatcatctgctcgcgagatgccttgtaatcacatctatcatcctgattgtattcttccttggcttgcgattcgtaactc

SEQ ID NO: 695 - DNA, 450 bp, Arabidopsis thaliana
agcggccgcccgggcaggtacagaacctccaaaaggaactgtccactgcttgtacaaagcatttggatccaacttcgtgcttctttccccagaacttggtttcaggcattaagactccaatgtttcttctcaatgcagcatatgacgcttggcaggtacaagagagtttagctccaccatcagttgacctaagcggctcttggaaggcatgcaaatctgatcactcgcattgtaattcatctcagatccagttcttccaagacttcaggactcatatggtagatgctgtaaagtctttcgcgacatcgacacataacggtgtgttcataaactcatgcttcgctcactgccaatctgaaagacaggacacttggtatgcaccagattctcctactcttcatggcaagaccgttgctgaatctgttggtgattggtacctcggccgcgacc

SEQ ID NO: 696 - DNA, 450 bp, Arabidopsis thaliana
gtcaaaagaaccaatataaaaggatgaacattgtccatacaattctgagttttaaaaatgcaaatgaaaagacaacaaacaatgtcttaatccgaatgtttaaacaacttgagagaccacatagacacgtgtgttcatcagattcatgaaagtttcgactaattttaaacattcaaagaaagcttttgagctgcaagggcttcagcctcaagagttggctcccacaggagtgtggtctctgccaaaagtgaggtcacaatgtatgggtccatgttagatgctggacggcgatcttctaagtaaccttttcctttcgcctcggtgtcacgtcccacacgaatagagcatccacggttagccacgccccatgagaactggtcaatactagctgtctcgtgctttccggtcaaccttctctcgtttccttcaccgtaggcactgatgtgctcc

SEQ ID NO: 697 - DNA, 450 bp, Arabidopsis thaliana
cggtttttatcaaattcctctactcttctagtttgacggaggatgagatggagagatatggaatccatcttttagcgttgtctcacgtctacatggtcacccagctgaagcaacggtgctcaaaaggcgttgtacaacgtttaactacagagaacgtagtcgacgtcctccagctagctcggctctgcgacgcacccgatgtttgccttcgatctatgcgtctgatccattcgcagtttaagaccgttgagcagactgaaggatggaagtttattcgagaacatgatcctttcctcgagctcgacattctccagttcatcgatgacgccgaatcgaggaagaaaagaaggcgacgacatagaaaggagcaggatctttacatgcaactaagcgaggcaatggagtgcatagagcacatatgcacacaaggttgtacctgcccgggcggcc

SEQ ID NO: 698 - DNA, 450 bp, Arabidopsis thaliana
  misc_feature (1)...(450): n = A,T,C or G
atcctctagagcggccgccctttttttttttttttgcaacacaatcaccattatggcccttccgttagcataattttcttggtcgaaacataatccgattatttttccttacaataaaagtgatcaaacacgtttatgatgatgaacattaaggagagggagccaccatgggcatgaaagcactagaagaggaagaagatatgtgagaatatctacaagagaaaaaactatggaaccacatgtgaggacagtagtacttcttaggttttacaaagaactccgcacattcttgcatcgatctttgtcctgggaagaaaggaatgcaattgttaccaacgtcaagaacacctttttcaagtaaacccctacaccaagnnnctacgtgcgtgnnatagttatccgacaacgacaagttgacaagattgtcccggagcagcatgcatactgcct

SEQ ID NO: 699 - DNA, 450 bp, Arabidopsis thaliana
ggatcctctagagcggccgccctttttttttttttttttttttttttttggtactaataagggaatctcaaatgaaaccatttagtaaaacactagaattaatggaagaaactgctgcttcacctttcacctactatgaattgagtaagacaatataataacctacaatctcagagctatcctctcaaagtgtataataataacttgggaggctgcatggtgcgagcttggtgaacagaccagacctcacctcggttgttgatctgacccgggagctgaggagacgcttggccctgctccgttttctggtggtgcggatattccccacttcccttctggacctggtggttcgatcacgtggaccccaccatcggttagtccaactgcaaactggtttggttcagacggatgtgctgcaactgtggctggatatactctcgagctcgggtt

SEQ ID NO: 700 - DNA, 450 bp, Arabidopsis thaliana
  misc_feature (1)...(450): n = A,T,C or G
gccgtcgcaagccggggatgttaaacgacgacgtctcgcgggcggaacatatttttccgtcttcttcatctccagaactcgagccagttgatttctcaactcaagaatcatcttgtgtctggaattattctttaacatatgacattgataaaggatgtctctgtcttttatctgattgccttttaacagccgtgannnnattaatgaacctaacaaatgataattctgttggttgtcgggaagttgctgcctgcggaggactggagagcatggctgaattagttgttggacactttccttccttcaccagatctccgctttacagtcagatggagtccgggacatgccaccagaaagataaacatctcacagaccnnnaattagattttcttgttgccatcctggggctactggtaaacttggtggagaaaaacggaataaacaggtcaa

SEQ ID NO: 701 - DNA, 450 bp, Arabidopsis thaliana
  misc_feature (1)...(450): n = A,T,C or G
gaagaagaagatggtgaaactggagaactcgaggaaacccgaaaaaatttcgaacaagaacatccccatgtccgatttcgtggtcaatctggatcatggtgatccaacggcgtacgaagaatactggaggaagatgggtgacaggtgtacggtgacgatacgtggttgtgatctcatgagttacttcagcgacatgacgaacttgtgttggttccttgagccagagcttgaagatgcgatcaannacttgcacggtgttgttggtaacgctgcgacggaggatcggtacatagtggttgggaccggttcgacgcagctttgtcaagccnnngtccacgcactctcttcactagccaggagtcaacctgtcagcgtcgtcgccgccgctcctttttactccacatatgtggaggagacgacatatgttcggtcgggtatgtacaagtggga

SEQ ID NO: 702 - DNA, 450 bp, Arabidopsis thaliana
  misc_feature (1)...(450): n = A,T,C or G
cccccaccgccacctccgccgcatttcattcctgctccaccgccggattctccactcccactcacatttcatcccagaacagcagcctgtccctcctcagccgccggggttgtatgatgagatgcagtttttctccgcaggacattcctgttgattccctctctcatctccctcctttccttgactttcagaactccctcgccacattttcggatacccagaaatgggggttctttgtctccgccggaatcgtctggttttacctcacggcgaggcctgnnnttctcatcggcgccattgacgcctaccttctcgctcccctccagcttggcctcgacactctgattggaaggaggttgaagaggtccgatttcttggtcactgagaaactcggcgaaggctctttcggcgtcgtctatgccggcgtcctactccccaagaattctactc

SEQ ID NO: 703 - DNA, 450 bp, Arabidopsis thaliana
aaattccgaatcgtgggtttggttcttctcgttacgagtctctcaaagtttaaatctttctttacaaaaaaggttacttttggttctgagtaaatcaaaatcaagcttttggccttcaatggtggctatgtttcaagaagataatggaacatcttctgtagcttcatcaccacttcaagtcttctcaactatgtcactcaacagaccgactctcctcgcttcttcatctccgtttcattgtctcaaagatctcaaaccagaggagcgtggtctctacttaatccacctcttgctaacttgtgccaaccacgtggcttcaggtagcctccaaaacgctaacgcagcgctcgagcagctctctcacctcgcttctcctgacggcgacacgatgcagcgaatcgctgcttacttcaccgaagcgcttgctaacagaatccttaagtcctggcc

SEQ ID NO: 704 - DNA, 450 bp, Arabidopsis thaliana
ccaccaaaataacctatcatatcaatcatcaatgcattatctgaaatgcttcttcctttgttttgttgatcatattgttgaagttgatcgagtaggcgttctgaatcgaagctcaagctgttttgggaggagctccttgtgcatatttggctttctttcttaaatacttctcttttttcctctgttttatcattttcgcctcttccatcatgcgtatgtgtttcacctgcctctgtgccttagtgagtttcctttgaggggttatgttttccttcttcttctctcgagtgaactctctctgagggcttttagttttcttcatcttcaaagggtttactttcagagagcttttcagcttcttcgatttctctcgactctgaggggtttcatccttcttccaagccttttgcctttgagggctattcatcttcttcggagtgatttgactcg

SEQ ID NO: 705 - DNA, 450 bp, Arabidopsis thaliana
acttacaagagctcaagattcttaagctagaggctaataatcttagtggagaaataccgaaagagcttggggatttgcagaatctgttattggttaacgtttcgtttaaccgacttatcggaaggttaccatttggagaagtgttccaaagcttagaccagagtgctattcaaggaaacctaggtatttgttcaccgttgttgagaggtccttgcacactaaatgtcccaaagcctcttgtcatcaatccaaactcctacgggaatgggaacaatatgcacggaaacagagctagcagtggttctggaacattccaccgtagaatgttcctgagtgtttcagtgattgtagcaatatcagctgcgattctcatcttctctggagttataattataacgctgcttaacgcgtctgtgagaagacggcttgcatttgtagacaatgcgttgg

SEQ ID NO: 706 - DNA, 450 bp, Arabidopsis thaliana
ttttccttttggaagtaagtaacaaaacataactgatggaacagtttcctacaatctaaaactctaaatagaacaatttggtgcccaaaccaatgaaagacaaacaaaaagtcactactaagcttaacaaaaaaaaaacatcaatcacgcaagtatatccttggatgtcgtctcactccctccccatttcttcatacgttccatcgtctcctccacctctttattccagtttgtcttatacagaacaatcaacagtaacaacgtttgaagcgctgtcccggctatcattccagaccaaagtcccatcactccaaagtttgcaatgtaaccaagaagatatccaaagggaaggccaaaaatgtagtaacagcccaagttgatataggccactaagccttgccaaccgcctccaacagccacaccagaaacaaccggctgcacactgttgag

SEQ ID NO: 707 - DNA, 449 bp, Arabidopsis thaliana
tcgagcggccgcccgggcaggtcccaactaaatcctcacgggattagatccaaagtctcaaactttgatccaaaaacacaaactttgttcaaaagacataaactttgagccaaagtcacaagctttcttggtgaacgatggattacaatccaaatcttcctcctttaggaggaggtggtgttagtatgagaagaagcataagtcgaagtgtaagcagagcaagtaggaacattgaagatatcttctcatctggttcaagaagaacacaatcagtcaacgacgatgaagaagctcttaaatgggctgccattgagaagctaccaacttacagtcgtctccgaaccactctcatgaacgctgtagtcgaagacgatgtttacggtaaccagctcatgagcaaggaggttgatgtaaccaagcttgatggtgaagatcgtcagaagtttatt

SEQ ID NO: 708 - DNA, 449 bp, Arabidopsis thaliana
aattctaggtcacaaatcaaaccagaagaaccctaatcccaatgttgccttcaccaatcactctctctctttatctactccttcactatgtcgtctccatcgtcacgcgacgtttccagactcaattccagcaaaatccagaaacctcacttcgtacttctccaccacaacacaagagccagtcctcgaatcttcttcttcttcttcttcagctcctgaggtagtagaagaagagatttctaaaaccagattgattgctcagaatgttccatggacatctacacctgaagatattagatcgttgttcgagaagtacgggagtgttatcgacattgagatgtctatgcataagaaggaaagaaatagaggtttggtgttcattgaaatggcttctcctgaagaagctgcaacagctcttaaatctcttgaatcgtgtgaatatgagggtc

SEQ ID NO: 709 - DNA, 449 bp, Arabidopsis thaliana
  misc_feature (1)...(449): n = A,T,C or G
tgcacatcgcatctttgtcgaagaactcggtgcgcaagaaagcgcattattgaactgcactcccaaggaggactttggaggagggcatccggatcccaatttgacctatgctaaggagcttgtggcacgaatgggattaggtaaatccgacactggaggtgaacctccagagtttggcgccgctgctgatggtgatgcagaccgtaacatgatccttggtaaaaggttctttgtaactccttcggattcagttgccataattgctgcaaatgctattggtgccatcccgtacttcagctctggtttgaaaggtgttgcaaggagcatgccaacctcagctgctcttgatgtcgttgcaaaaagcttgaatttgaagttctttgaggttccaacannctggaagttttttggtaatctgatggatgctgggatgtgttctgtttgtggag

SEQ ID NO: 710 - DNA, 449 bp, Arabidopsis thaliana
gttctcccaaaattcaatccggaattatgaaaaaagggtgactgagagaactgagaagctattgagactacacgtaggacgatttagctactacgatttgaagatggaagtggaaaagagagcttcaaggttgattatacctaggaaatgtcttggaccttagtttccgttggttcagagttagtctcttttgcctctgttgatgattgcttctcgtcattaacatgctccggagatttttcaggtgttgtgttcttgttcttgtcgcgccaccctagtccaaatggccgtgctagcaaactgatcctgcttggaggaggttctggtgacgaatcttggttaacttgccgtggtgaaggttgtgctttgagttggccagattgatactgcaaagttgcctcgagcatggactctgccatcactgctctcttctccatttcagccagtgc

SEQ ID NO: 711 - DNA, 449 bp, Arabidopsis thaliana
ggtcgcggccgaggtacttgtcatcgtcacaatgtatctcgcaatttgaacagcaaccgaagagaaaaccatctccaagttttcaactttctgattatactcatctttagacaagaaccctaatttactaaaccctaaaaacccagatttcaaagaatcccacgacccatttcccttaaatttctcaacttttctctttctttcaacttttttctcacaccgatgcacataaaccctattactacgttctctacaagtcaatcttgacccgacccgtatcggatctctgaagaagagacggtgctccaagacttgtgggtacacttgaatcttcgttaaagtagtcattgctatggaagaagagtgagataatgataagctttgaaactcatacaaaaagataacttagaaaacaagataaaggaagacctgcccgggcggccgctcga

SEQ ID NO: 712 - DNA, 449 bp, Arabidopsis thaliana
tcgagcggccgcccgggcaggtgatggctgaagcagcgagaagacaaggtggtgggagaccattaccgccacctccgagaggcgttaaccaacaacctcctcgccctaaacctgaacctgtcgatcgtgaaaagacatgtccccttcttcttcgtgttttcaccaagagtggtggtcatcatactagtgaagattatgctgtgagaggcaaagaaccaaaggatgaagttcaaatctacacttggaaagatgccagtcttcgcgagctaacagatttggttaaagaagtttctgtagcagctaggagaaggaatgctagattgtcttttgcgtttgtttatcctaacaataaaggtggctataatgtgagagaggttggggagacgatggcttatccaaaccgaaaacaaccagatgacagtaaaacgctttccgaacttccgtttgag

SEQ ID NO: 713 - DNA, 449 bp, Arabidopsis thaliana
tggcgctcgagcggccgcccgggcaggtataaaaatctctatcttcttcttcgtctcttctcatcctcctctcaagctccaatggcgagagttctagtctcgtctccatcttcattcttcggttcaccgttgattaaaccgtcgtcatctctccgtcacagtggagtaggaggaggaggaaccgctcaatttcttccataccggagtaataataacaaactcttcactacttcaaccaccgtacgattcagcttaaacgagattcctcctttccatggcttggattcatctgtagacatcggagcgattttcaccagagctgaatctcttctctatacaatagctgacgccgccgttgttggtgctgattccgtcgtaactactgattcatccgccgtgcagaagagtggtggttggtttggttttatctccgatgctatggaattggt

SEQ ID NO: 714 - DNA, 449 bp, Arabidopsis thaliana
aatctctctctatcgagaacagagaccaagaatctcgagagaatccactttggtcatacatgagacgcttaacttagacagaagcacctcactcggatctctatataatgctacactgcctctctcatgagtctctacggaaatcttttattgctaaaccaactcaagactctaagagagattacatcttcatgctgctcaacaatggctcaccagatgccagcctgtctataggactgcaaagggtagctgtgaaacggataagctctagccatatggaccggctttacggctgcaggtattgcccaacttaactctcttcttggaggtggaggtggaggtggcatattcctccttctgtccacttctatcagtgtgcacatctcctggattacctcttttaatagcttagttgtaactccaaactccaaccaccaatctctcctgct

SEQ ID NO: 715 - DNA, 449 bp, Arabidopsis thaliana
  misc_feature (1)...(449): n = A,T,C or G
cttttttttttttcaaactgataagaaaatttcggtcatcgtttgtttgtcaataaatatacaaaaaggaaaatattcaaaaggtgtgtttaccaaagagattctaagcaagataattgtatatctgagggttgcttttttccctctccaaatattctcgatcgatcaagctctcaatcctcttcttcagatcagcaggctttatcgggaatttgagctgttggaagagctcagtgattagaagagtatggctcaagacttttcttgtcttcataatacgaacaatggctgcatcgatctggtattgtcggtcctggaatactctttccgttgtacttgtgttctcctctactgtctctttcatctggatcgcatttaccttaatgcgatacagcgnngctgcaaactcatcattaaattcaaattcatcaccgtcttctacatctctt

SEQ ID NO: 716 - DNA, 449 bp, Arabidopsis thaliana
gccgccctttttttttttttttttttttagctgaaaactggtagagagagatatataataaaagagcccataaaagaactcagacaacaaacatcttaagtttattaagtttccacaacaaacttagaaacacactcctttacatggcatctccaccacaaagaaatatgcaatgaaacgtccacgatttattatccccaaactttggtaaaaatgtctgaaaaaagtccctttcacgattggaggacgggttcgaagctcacttgttccaccaatgcaagaaatccttgcgcctgttgattttcttctgaagctggagtagtccatagagcaaagcctcagcggttggtgggcaccccgggacgtatatgtcgactgggacaattctgtcacatcctcgaaccaccgagtaggagtagtgatagtatccacctccattggcacaactt

SEQ ID NO: 717 - DNA, 449 bp, Arabidopsis thaliana
tttttttttttttttttttttttttttttttttttttttttttttttgaccaagaagaaacaaattgtatttcaacaagtaaacgacacaagaaggcccttttagccatgttcttattactgttcatagttctcacaaagatagtgatcttaaaagaaatttgataaacagtaactcacagtgtttttccacgactggcttgaatcaaggaagaacatagagaggctccggcatttttgctctttgtatccagttgtcttttgcccatttacatccatcagattctactacatgtaagctataggcatgtcttgacttcgaggatagattctcgaaactttgatggattagatcaccatgaatggcaatcaatgagcctgctttcatttcaatagacacaaaatctttctgctcgtaagatggggatggctgatcaaaggttataccgt

SEQ ID NO: 718 - DNA, 449 bp, Arabidopsis thaliana
gcggccgctttttttttttttaagaaaataaacaagaaaagattctcttgttctgttttattaaacttgagaaaaaaacagagcatgtgttcaatgatctcgaagtactcgtacacgaaaatcaacattttgacggtggatacataaaataaaccagaatccaaccttattttccaaatctgtagttaaaaaaaggagagacttgagagagaaagagagattcaaagtttgtttaaccatctctttgtagcttaaccggtgttttgtagaccagcagcaatacccttcatcgtcaagatgagtgtatcttcaagtcctggcgcgtattcgctagtcgggttaagctcgatgagttcttttgctggtttgctcgattccgctatctccttagaaatgtgtggtcgcagagtcacatggtaactcggatcacggattctcttcaatgtgta

SEQ ID NO: 719 - DNA, 449 bp, Arabidopsis thaliana
gcggccgcaatattttcataaaccactgatttgtctatgatcaggttatagtttctttccttcttcttcctctatgtttctgcaacttttaccggaacttcaaaattttgcgggaaaaaaaaatcgaaactttttctttctctctacgttgtctcggcggttacttgaaattgattcgttgattgagtttaagtaaccctaatcattgctgggtttcacttttttcgatttctttattcgggtttgaagttaacttttaaaaacctttctttcaggaattttgtcgaacaccttcaatggattcttcttcatcagtcgtttacgttggttcatcatccaaatccagaaactttcaatctaaatccaaaggttcgattacatctttctcaatcgattcaagaggcaccaagaaatcaatgaagacgttattaatcccagaaccagaacca

SEQ ID NO: 720 - DNA, 449 bp, Arabidopsis thaliana
  misc_feature (1)...(449): n = A,T,C or G
cctctagagcggccgcccttttttttttttttttttttttgattaaccaaaccatcaaattgattcacagtacaggaggctgaaaacgcaaacaagattgatttcatgagaaaagattaatgtaattgtaagcatgtaaatttacagtaaanaaaagattagtgatgaaattaaaagttttgaggtatctatcgtaagatataacttgtcatgatcaccaacacgcttcgagcatagtaacaatggagaagagaagtcttatcttcgtctgggtctggcttgaaccggagaacccattggttgtgactctctatagtttctgcttggagaatcagttgatgttctggagtaggcagctttggctactggtggcactggatccaacggaatggtctcaatgaaacatgcactgttcaaacgggtcttctctagctccagttgaagcattc

SEQ ID NO: 721 - DNA, 449 bp, Arabidopsis thaliana
ttttttttttgagataaactgatattatcataagtcataatctgatgtcagagaatccattccagaaatatggaatacgaattgtgtccttcacagtcacactataccattagggaaagagagaatcttaaaagaatacgtagaaacaccatctcatatagaagaaaagcaaaagaagattgatttcctttttcattttttctttccaaataccatttctctttcactagccagattctctcctttgacaggcgtcgtggacccaatttttatgtgccgcaacatgctgatttctgagtagcttgagatgttcccgcaccttggtcggattggttgattttgattgtttgcggctcagctcgtgcatcggtatctgcaagtctttgcttaatgtctttagcaatagagaagaaaacttcctcaacgtttaagttagtcttggcactagt

SEQ ID NO: 722 - DNA, 449 bp, Arabidopsis thaliana
  misc_feature (1)...(449): n = A,T,C or G
ttttttttttctcttgaacaatatttaactatatatgcaacatcttcttctaagctgatcttaattgcaacatcttctacgaattaatcaaaagccaaaaacatatacaaataaaagttgagacaaacgaagcaaagaaaagtagaacatacatatacatacagaaacacatttgcacaaatcccaccgttgattatacaaatcatattagaacatcaaatatttagtggttgccattttgctctaactcttttttgtgggctttccactttaaggccacaagactaagtgcttttgtcgaagtcccatcatccttcaacaccctacaagctgcttccttcaactccttcatcttgttcctcactcctttgccttcttcnnnttccatcaatccttttaccactctagccacctcttctcttctaactaacccatcgtccccggcacgc

SEQ ID NO: 723 - DNA, 449 bp, Arabidopsis thaliana
cctctagagcggccgccctttttttttttttttttttttttttttttttttaccacaaaaatactgactgatacttcttgaatccattaaacacttgaagggattgtcataaacgagataactacagcttctttaagtcattttcctcaaaacagagtgatttaaagaacaattattttctgaacaactgaaatatgagatacaaaagccaagtactaccagcttcggtttcgcaaagccaataccagtaaccgcagaagaaattgagcttttcctcgaaactgctagtcttagtcacatttgaagatccctgcttctagacgagcttggctttagtagatctcatcatcaggtatctcgggagtcaagaatttcatcggatccttgctaatctcctcgtagtttactctcggtttcactctatcaggaacaggttcaagaggaataat

SEQ ID NO: 724 - DNA, 449 bp, Arabidopsis thaliana
tttttttagttgaagcagggcctattaatgccaagacttttctattcagtcgaatacattttcatgttcttaaagaatacaatcttgaaacagagtaacccattgatctacaactgaatgaagctgttctctgttcattatactttttcttgtgaggtatacggtgacttactgagctacgcagctttcactttctcagcgtatcggcttgtatcttcggagtacagtacaccatcccgcgatagaaggcggaaaagagatagagaaaaccgagcccattggaatcccacgagagcataccagcagcctctcaaaccaaatcctccattgctcagaagcataagtagaagcccagcgaccgctaagcatccagtcattgacaagctgatatatctaagatctcttccagccttcatttcatatacaacagtcttagttcttctagatta

SEQ ID NO: 725 - DNA, 449 bp, Arabidopsis thaliana
  misc_feature (1)...(449): n = A,T,C or G
cttgctgctgttttccatcaatctgtgccacaagaatcgcagtcgtcatctcctgccttggactacttactggtttacactccatcaggtcatgtagttcaatacaaactcattccatctcttggaggagaccaggctgagagcaatacgcgaaatggagcaacttctgggctgacctctgaagaggaactgagagtgaaagttgaaccagttcagtgttgggatgtctgtcgaagagcggattggccagagagggaggagaacatatgcgggcttacttatggtggacgaaaaaatgctgagttaactgttgatacttctgatagtgaagatcaaacaaagcctctggagaaacaccatgtttatcttgccaatgcnnnggtgctgataaactccggaagaaaaccaatctggcaaaattcagagatatctttctatccgatgtatcc

SEQ ID NO: 726 - DNA, 449 bp, Arabidopsis thaliana
cacggggttggcttcgttgctgatatccggcggatgaatgttgctctcacccgtgcgaaaagggctttatgggtgatgggaaatgcatctgctctgatgaagtgcgaggattgggcagcattgatcactgacgccaaagcaaggaattgttttatggagatggagtctcttcccaaggatttcccggttccaaaggtacctagctttatcccaaaagcacctaatgctagaggtttcagatcaggtgggccaagaaccagatccatcgatatgcaccctgaatccaggtcagggacaccatcagaagacgacaagaagctgagcacaacaacatttccaagaaatggaaattctcgaagggagaactcagttgatgattctgacccgcccggggatagatatagagatgcttggcaacatgggatccaaaggaggcaaaattttggacg

SEQ ID NO: 727 - DNA, 449 bp, Arabidopsis thaliana
  misc_feature (1)...(449): n = A,T,C or G
ttctcatctctttccatttgtggaattcaatggaagctttaggtttttggtgctgagaattctctgttttcgaatctagggtttgtagaggagatctattcaattgtagatacgcaagagcgaaacgagtcagaaaactaggagaaggagtcatgtcggattctgataaagagctcgagaatcagattattgaagctggggaaaagcttattgacccgccttcttcactcgatgagcttctctctttccttgacaaacttttcgtatccctggcggaggttgaacagtcacctcccgactcaatgcagaatgcactcactccattgatgaaaggattagtcggtggaaaactcttcaagcattcagatgtcgatgtcaaagttgctgtcgctnnntgcatcagtgagattacaagaataactgctcctgatgctccttatgatgatgac

SEQ ID NO: 728 - DNA, 449 bp, Arabidopsis thaliana
ctgcttcttcctcaatcttcctcttcacctcctccaccaataacaacacaaaaccggaaaagatcaaaccttacactagaaaatgggagactagtgtgatggacaccgttcaagaactcaacctcatcaccaaagattccaacaaatcttcagatcgtgtatgcgatgtgtaccatgatgttcctgctgtgttcttctccactggtggatacaccggtaacgtataccacgagtttaacgacgggattatccctttgtttataacttcacagcattacaacaaaaaagttgtgtttgtgatcgtcgagtatcatgactggtgggagatgaagtatggagatgtcgtttcgcagctctcggattatcctctggttgatttcaatggagatacgagaacacattgtttcaaagaagcaaccgttggattacgtattcacgacgagttaact

SEQ ID NO: 729 - DNA, 449 bp, Arabidopsis thaliana
atgaagctgacaggcctgtcaccttattggtttgatgtatcttctggaaccgctgttcacaataccgttgacatgcaatcactgtttcttctaactggacctaacggtggtggtaaatcgagtttgctcagatcaatatgcgcagctgctctacttggaatttccggtttaatggttccagctgaatcagcttgtattcctcactttgattccatcatgcttcacataaaatcatatgacagccctgtagacggaaaaagttctttccaggtagaaatgtcggaaatacgatctattgtaagccaggctacttcgagaagcctagtgcttatagatgagatatgccgagggacagagacagcaaaaggcacctgtatcgctggtagtgtggtagagagtcttgacacaagtggttgtttgggtattgtatctactcatctccatggaat

SEQ ID NO: 730 - DNA, 449 bp, Arabidopsis thaliana
  misc_feature (1)...(449): n = A,T,C or G
ctcggtgctgctcatttagggttaaaccagtttgagttagccgtcactgcttataagaaaggtttagatgtcgatccgactaacgaggcgttgaaatctggattggctgatgcggaggcgtctgttgctaggtcacgagctgcaccgaatccgtttggtgatgcttttcaaggaccggagatgtggacgaagcttacgtctgatccttcgactagaggctttttgcagcagccggattttgttaacatgatgcaggagattcagaagaatcctagcagtcttaatttgtatttgaaggatcagagagtgatgcaatctcttggagttttattgaatgttaagtttaggccaccgccgcctcagggagatgaggctgaggttcctgagtctgatannnnncagacttctagtaatgagcctgaggttgagaagaagagagaaccggagcc

SEQ ID NO: 731 - DNA, 448 bp, Arabidopsis thaliana
  misc_feature (1)...(448): n = A,T,C or G
gattacaatgctatcataggacaaatgtttgataacgagactggaatcaaaggaactcctcctgcatccaaaagtgtagtagatggtcttcctgatgtggagcttacgattgaagaattgagcagtgtgagcattgtttgcgcgatatgcaaagatgaggttgtgtttaaggagaaagttaagaggcttccttgtaagcattactatcatggagagtgtataataccttggttggggataaggaatacttgcccggtttgtcggcatgagcttcctactgatgatctggagtatgaaaggaagaggagagcatgaaggcgtggtaatggcggtttggaaagggagtcgatgctcgggtagagaangagtaactgtgcgttatatcttcgataattgtctaatcagtaacgatctgttcctcgttgatatgatgtacctcggccgcgac

SEQ ID NO: 732 - DNA, 448 bp, Arabidopsis thaliana
tcgagcggccgcccgggcaggtggtttatctcagatcgaaatcgagaagaagatgtttctcactaggactgagtatgacagaggagtcaatacattttctcctgaaggtcgcctctttcaggttgagtatgccattgaagctatcaagcttggttctactgctattggtgtaaagacgaaagagggagttgttcttgcagtcgagaagcgtattacttcgcctttactggagccgagtagtgttgagaagattatggaaattgatgaccatataggttgtgctatgagtggtctgattgctgacgcgcgaacacttgttgagcatgcacgagtagagacccagaaccacaggttctcgtatggtgagccaatgactgtagaatctacaacacaagctttgtgtgatcttgctttacggtttggtgaaggagaggaagagtcaatgtct

SEQ ID NO: 733 - DNA, 448 bp, Arabidopsis thaliana
tcgagcggccgcccgggcaggtacagacgaagtagacctaactgtcgatgccgtagggctcgcacttccatctccacctagtctcttagtagtggctttcacacctttcttcttcttcactgccattctccatttcttgagtgcttttgacgtttgttcatcgaataccgattttttcatccgagaacccatctgagttacgagtgcgtaaagaggaagtgtgatgtagctgcaaagacacaatactcctaaagcaatcgctacttttacaagtgcaatcttgaaattaggatggtagcaagaatctgatccaaaggaataccatatccagaagaaataagtgatctgaaatgcgttctgaaacaaggcgaaatgcatgagatggagaatcaaatggggacgaccgaaccagaaatactcatcgttgccttgtacctcggccgcgacc

SEQ ID NO: 734 - DNA, 448 bp, Arabidopsis thaliana
tcattctcctgtgtgagctcttcctcttcttctgtttaaggttctttctccttcttcttttgagggggtttaaagcttcagtggacgaaaagagtttgttttttgggtgacaatgggaggagtggtgcatcttagcacggcgaagttagctagaggtttcttagtgtgtttatgtctttggggttttttctcgctatcatacgccgcaaggtccggcgtatcaaagcagaagtttgaagtgaagaaacatttgaacaggctgaacaaacctgctgtcaaaagcattcagagttcagatggtgatgtgattgactgtgttccaatctcaaagcaaccagcttttgatcatccgttcctcaaagatcacaagattcagatgaagcctaattaccaccctgaaggactctttgatgacaacaaagtgtctgctcctaaatcaaatgagaaa

SEQ ID NO: 735 - DNA, 448 bp, Arabidopsis thaliana
agagataaaacagcggaagagagaaggattgctatatgcatttttgatgatgtagcagaacaatgccgtgaagctgcctttaaatattatgatacctatcttccatttgtactggaagcttgcaatgacgagagcccagaggttcgacaggctgctgtttatgggcttggcgtttgtgctgagtttggcggctctgtattcaagcctcttattggagaggctctgtcaagattaaatgttgtgatacagttgccaaatgctcggcaatctgaaaatgccatggcatatgataatgctgtatcagccgtgggaaagatctgccaatttcaccgtgatagtattgattcttctcaggtacttcctgcgtggttgaactgtttgcctataagcaatgatgtccttgaagccaaagtggttcatgatcagctctgctcaatggttgaaaggc

SEQ ID NO: 736 - DNA, 448 bp, Arabidopsis thaliana
tcctctgagattggtttaagattaaaccagacccatctaagggatctggaacaagcttcgtctctggttccactctgatcatcagagtattaaaaatggagtctttcttctccagatccacctccatcgtctccaaattgagtttcttggccttatggatcgtcttcttgatttcttcatcttcttttacttcgacagaagcatatgatgcgcttgatccagaaggcaacattacaatgaaatgggatgttatgagctggactcctgatggctatgttgccgtggttacgatgttcaacttccagaaatacagacacattcaatctccaggatggacattaggttggaaatgggcaaagaaggaagttatatggagtatggttggagcacaaacaactgaacaaggtgattgttcaaagtacaaaggaaacataccacattgttgtaa

SEQ ID NO: 737 - DNA, 448 bp, Arabidopsis thaliana
  misc_feature (1)...(448): n = A,T,C or G
tcatcaacgataagacaaaatccataaactagtaatatcatccaatcctctcacttcttccttattccctcactttcactctcactatctgttgacttcacatggcttccaccgccgcaactgcagctctttcgatcatcaaatccaccggtggcgccgccgttacacgctcctcccgcgcctcctttggacacattccctccacatctgtctccgcacgtcgccttggcttctccgccgtcgttgactctcgtttctcggtccacgtggcgtccaaggtccactccgtgcgcggaaagggcgccaggggagtgattacgatggcgaagaagagtgttggagatctgaattctgtagatttgaaggggaagnnggtgtttgttagagctgatctcaatgtacctctcgatgacaaccagaatatcactgacgacactagaatcagagc

SEQ ID NO: 738 - DNA, 448 bp, Arabidopsis thaliana
  misc_feature (1)...(448): n = A,T,C or G
acacataattcaatctaattacaaatctatatagactttaattaacacttaataacaccacacaccaatgcaataaaatatcatttcctatagtttatcgctccctttataaacaaaatacaagcttgcaagacctattgttccttaattggttttaacaactggacttagatcttccttctcgaatcctttgccaacaatgtcaatcaactcctcttcctctctcacaccattaaccctaccattccttacctggtcgaccaaaggaccatacgaccagctacatatcacgtagtagatcacattgatgaagctcattatcgcgagtacccaatagtaatagttgtagtgacccttgnnnatgttgtctgaaacccaactctctttaccatttctagaagttagttcattgaccgcattgaggaccacgcttgccaatagactagcc

SEQ ID NO: 739 - DNA, 448 bp, Arabidopsis thaliana
ccacgcgtccgaaagaagatctaaagagataaagagaatgatgaagaagcaagtgacgatagtggcggctcttctgattatgatggctttatgttccagcttgaatatggtggccgaggctcaattaggccccggagactgctacgacggttgctccaccgcctgcgtccaacgtgacccgagaaagacgtcccgatgcgatcgcaagtgttccattcgttgtggtccagatgctgccagggcaagtgggagtggtgtttaaactttatattttaccaagatccatgcatttggatttaattatgttgtaatcttatttaataatcgtatctctggaaaacatattctgtaatttttatgtagttattggaaccaataaataataacagctacaatggtggaattaagtacactagtgctggtttgtaaaaaaaaaaaaaaaaaaaag

SEQ ID NO: 740 - DNA, 448 bp, Arabidopsis thaliana
gacaagcaaagaaatgatgatgaaaagtgctttgtgcaaaaatatgcacaaaggtggtaaactattgtttgtttttttttgtttaagaagagactctcttgaaacccaaacatacaacgaaagaggtacctcaagtttcaaaaattctttaaaagaaacaaagacaaatcttcctactcattcttgagcattactacttgcgtccattggctcagcctctgttgaagcctctcctttctctcccgccttttgggctttcttcttctttccaccacctttcttcttcttgatgcccaaagctaaccaccctttgatctcagggtcttcgatggtctttttaggaagttcctgaagtgtatgtgaagtgatcctatctgatccatttggcatcagcaaaactgtgaacttaatctgagcaacaaaatccccaggcttctcgtaaagaaca

SEQ ID NO: 741 - DNA, 448 bp, Arabidopsis thaliana
tcgagcggccgcccgggcaggtatcgatacagatggcagcttcatcagcttgtcttgtgggaaatggtttgtcagtgaacacaacaaccaaacagaggttaagtaaacatttttccggcagacagacaagcttttcttcagtgattaggacatctaaggttaatgtagtgaaggcttctttggatgggaagaagaagcaagaaggaagaagagattttctcaaaatcttgttaggaaatgctggggtcggtttggttgcaagtgggaaagcaaatgctgatgaacaaggtgtttcttcgtcgaggatgtcgtattctaggtttctagagtacttggataaggatagggtgaataaagttgatttgtatgagaatgggactatagctattgtggaagctgtttctcctgaattgggtaaccgggttgagagagtacctcggccgcgacc

SEQ ID NO: 742 - DNA, 448 bp, Arabidopsis thaliana
  misc_feature (1)...(448): n = A,T,C or G
gcccgggcaggtgtgtttgtgctggcatttgtccttttaactttccagccatgattcctttatggatgtttcctgttgcagtgacatgtggtaatacctttattctgaagccatcagagaaggatcccggtgcttctgtaatacttgcggagttggcaatggaagctggtttacctgatggggttctcaatatcgttcacggaaccaatgatactgtgaatgctatctgtgatgatgaagatataagggctgtttcttttgttggctccaacacggcnggaatgcatatatacgcaagagcagcagcaaaaggaaaacgtattcagtcaaatatgggggcgaaaaatcatggacttgtcttgcctgatgccaacatcgatgcaactttaaatgcgctacttgctgctgggtttggtgccgctggacagagatgcatggcactgagtac

SEQ ID NO: 743 - DNA, 448 bp, Arabidopsis thaliana
  misc_feature (1)...(448): n = A,T,C or G
gcggccgcgtaaccatggcggagaaagtatcggaggacgttatgcttctacacggtgacctcgatttgaaaattgttaaggctaggaggttacctaacatggatatgttctcagaacatttgcgccgtctcttcaccgcctgtaacgcctgtgctagacccaccgataccgatgatgtcgatcccagagataaaggcgaattcggtgataaaaacatccgtagccaccgtaannttatcaccagcgatccttacgtcaccgtcgtcgttcctcaagcgactctagctcgaacacgtgttttgaaaaactcacaagagcctctttgggacgagaaattcaacatttctatagcgcatccgtttgcttatctcgagttccaggtcaaagacgacgatgttttcggtgctcaaatcattggcacggctaagatcccggttcgagacatcgc

SEQ ID NO: 744 - DNA, 448 bp, Arabidopsis thaliana
  misc_feature (1)...(448): n = A,T,C or G
cgacgcaagggattggtttcggaatcactgagcgtttcggtctcgaaggcgcnnncgtcgtcgtctcttcccgcaaacaggcaaatgttgatgaggcagtagcaaaactcaaatccaaagggattgatgcatatggaatcgtctgtcatgtttccaatgctcaacatcgccgcaatcttgtcgaaaagacggttcagaaatatgggaagatagatatcgttgtctgtaacgctgctgccaatccatctacagacccaatcttgtctagcaaagaagctgttcttgacaagctttgggaaatcaatgtcaaatcctctatacttctcctgcaggatatggctcctcaccttgagaagggttcttctgttatcttcataacttctattgctggattttcaccacaaggagctatggctatgtatggtgtcactaaaactgctcttctcgg

SEQ ID NO: 745 - DNA, 448 bp, Arabidopsis thaliana
cggccgcgggaagacttagatgtaagaacatattgataaaatatgcactcaagacttagaagtagatccaagtccctaacatgtcatctttttcaactgttttctctttttacaatgacaaaaaaagtgatccagttacaatacaacattacacaacaacacaacagagctgagctaactgtctaaaaggatacacaatacatgttacaaatcctccctgcaagacttcgctattggtcatttagcaggtggttcgttacgaagatgttacaagaggctatttttgtgttcgttaccttcattttcttcccgtggtagtccctttgaacagctcgttaatacgcgcctctatgtcctcaactccatacttgatgtacttgtctgcgtttttccctatgtctccaaggttttggaacctgccgatgaagctcccgtatgccggtaccaa

SEQ ID NO: 746 - DNA, 448 bp, Arabidopsis thaliana
ctcaaactttttgaatccgaaacgagaaaacaaactatgttacagtccattcatcttcgtttttcctccacaccatcaccttctaaaagagaatctctcataattccatcggttatttgctcatttcctttcacctcttcttcgttccgtccaaagcaaacccagaaactgaagcgtctggttcaattttgcgctccttacgaggtcggaggtggatacaccgatgaagaattgttcgaaagatacggaactcagcaaaatcaaactaatgtcaaagataaattagatccagctgagtatgaagctttgcttaaaggaggcgaacaagtgacatccgttcttgaagaaatgattaccctcttggaagatatgaagatgaatgaagcatctgagaatgttgctgtagaattggctgcacaaggagttatagggaaaagggttgatgaaa

SEQ ID NO: 747 - DNA, 448 bp, Arabidopsis thaliana
tacggcagactcgacgagcatgagcaagcgaaacttgaggcaagtcggaagacaaagaagagaattgccatcatcgctatatcttccatcgttctcgtctgcattgtcgtcggagccgtcgttggaaccacagctcgcgataacagcaagaaaccaccgacggagaataacggagagccaatatcagtctccgtgaaagccctgtgcgacgtgacattgcacaaagaaaaatgtttcgagacccttggatcggctccaaacgcgagccgatcaagcccagaggagcttttcaagtacgccgtcaaagtcaccatcacggagctctcgaaagttctcgacggattctccaacggcgaacacatggataacgccacgtcagcagcaatgggggcttgcgtggagcttatcgggctagccgttgatcaactcaacgaaacaatgacgtcgt

SEQ ID NO: 748 - DNA, 448 bp, Arabidopsis thaliana
  misc_feature (1)...(448): n = A,T,C or G
tgagggtatgaagattgacaggggatacatctccccgtacttcataactaacccgaaaacacaaaaatgtgaactagaagatcctctcattcttatccacgagaagaaaatttccaatataaacgcaatggtgaaagtattagaactggccctcaagaagcaaaggccgctgctgatcgttgctgaggatgtggagagcgatgctcttgccaccctaattctgaacaaacttcgtgctaatatcaaggtctgtgctgtgaaggcccctggttttggagagaaccgaaaggccaatttacatgatctagctgccctcactggagcccaggtaataacagaagagttgggtatgaatctagacaacattgacctcagtatgtttggaaactgcaannnnntaacggtatccaaagatgatactgttgttctcgatggggctggtgacaag

SEQ ID NO: 749 - DNA, 447 bp, Arabidopsis thaliana
tttttttccagtgatccatcatcaatttaaacaaatcaaattgaaaaaaaaaaatacaataaacaacaaagtgataacattaatacgacgacaaagagattcttaaggggcaaaacatgaacttagaaagaaagaagaagaaaaacgagaacaaggaagaagattctcaatcattcattcagaagctttctctggttttctacagagaatcatatgcatcggagagaagattccagtctcaccacctctggtcaaataatcagcagtcttaaacaacatcttatgaacatcaacagttcctttaggagcaaccccaatagcagaaagaatcacaaccacaacatggtttctccaataagcaatccttcccatctttaaccggttccaccacggtttagacggtggtttagccaaatctttctccttcactacctcaaacccaacttt

SEQ ID NO: 750 - DNA, 447 bp, Arabidopsis thaliana
cttttttttttttttttttttttttttttttttttttaaaaaaaaagttcatagcaataaccgagccattgtcaaacgtttcaaacacgagattaggcttatatgcgttatagcataaacgcaagataatgaaagagacgcacccaaaagacagaggcacaaaagctaagacgcaacagcaacattggggtcttggtagttgttgtatgaatggccatttcctccaccaccaccaccaccacgtccccttcctctgttgttgtagtagttcctttgataaccgtttccaccagattgatcataagattcgtaccgcccattctggtagccaccaccaccacctcgtcctcctcgcccattctgatagccaccaccacctcttcgagcacctcgacgacctctttggttctggtaagacccacgtggcacatagtctcttttagcatt

SEQ ID NO: 751 - DNA, 447 bp, Arabidopsis thaliana
aaaagcgtctggtttctccagctcaatcttttcctccaaagaggcagagatttgagcaggacgagagtgttgagaagctaccagatgctctgcttcttctggagtcaccgacactcgctcaggtgactggcggagaccatgcttccgttgttgcagctgcaatggctgagagtgcattaaggaagagagacttgagtgggaatgcttcttctcttcctcgtcgtcccaagctaccaagaggaaatttgcctcattcaaagaattatcctgaaactttgggtaatgtgcttgtgcctcctcagctcaagggaaggagcaatgttgctacagaggatatgagcaggctttttgtgaaaaaacggcaagactccaccaaggcaaaatctccagaccaggaatagtttggtcaaatttgaatggttttatttctctgactaattacgtaac

SEQ ID NO: 752 - DNA, 447 bp, Arabidopsis thaliana
tcgagcggccgcccgggcaggtcttctttgtttatctcatagctcttcaccaaaaccaatattctctcctttgttgttctttcttttctatcaaaactttctacttaaaatttcattcctttaaacaatgataagcaaggatccaagatcgagtttacctccagggtttcgatttcatccaacagatgaagaactcattccccattacctaaggaagaaagtttcctcttccccagtcccgctttcgattatcgccgatgtcgatatctacaaatccgatccatgggatttaccagctaaggctccatttggggagaaagagtggtattttttcagtccgagggataggaaatatccaaacggagcaagaccaaacagagcagctgcgtctggatattggaaagcaaccggaacagataaattgattgcggtacctcggccgcgacc

SEQ ID NO: 753 - DNA, 447 bp, Arabidopsis thaliana
aacaagaagatttatagggacaatttttctttcgatattataggaatcccacattttataatcctgttcttcagattaatacattaaatagaataatctaaacccgcttggtccctaacatgaagtcttatgaaactaatgagctaaagggacttgaccaatgactaaaagctatacctgattgacagtatttatatacgtgtaacaatacctctgcttccaggagatggagatcataccaatgtggacacattttaatacaacattcgagaacagaacatggcttcaatcagacaactgcagaagtagtacgcctaaggtcaacatcattcttgaatttctcacttggcggtgttcctttgaagcttccatatctcatgggcttaggcatgtaaagagaactgagtatcttctccaaagctaccacagtgtatctcacatacttgc

SEQ ID NO: 754 - DNA, 447 bp, Arabidopsis thaliana
ttttttttttttttttttttagttgaacaaagaaaccatcttatattcattctggatatggcgtttagttatactacaaatggtgaataacaagaaaagctaaacaaaaacaagtaaaagcattctcagaatcaccaaagttaagctcatgaatctttatccttggataagctccatgagagtctgcttataacattttcgtctactattttgtagtggtgagacaaccgcctgtgaatcgtcccgcaacacttgtctactttgctttgatatttactgtacaaagccggtattgttacagataggatggtcccgatgtaaagaagagtgcagagagatatatagctaccaatggcagagagaagccacagacaaatcaccaccttgaagaagagtcgaaaatcgttgccaactgtgacatcatgagccattacaagcaagtgattg

SEQ ID NO: 755 - DNA, 447 bp, Arabidopsis thaliana
cactcatcaccctaaaaccctaaactctctcaaaccaatcaccaccaaatcacaaccatgtaaaaccccagaaataccctccactcccaacgctcttcagctccttaaatcatcctctctccctctcgcagtcatcgcattgcctttcttcctcgacccacaggatgcagcagcagctggaggagaattcggaatattagaagggagatcatttgcgttgatacacccaattgtgatgggaggtttatttgcatacactctttggactggttacttaggttggcaatggagacgtgtccgtacgatacagagtgagattagtgatctcaagaaacagcttaaaccaactcctgtttcccctgatggttccacagccgttgattcttcgtcgcctccttctacgactgagcttcagatccaacggctaactgaagagaggaaagagtt

SEQ ID NO: 756 - DNA, 447 bp, Arabidopsis thaliana
tttttttttttttttgcagaaaaagagaatcttatagagaataatccgcgagcaacatttcagatcagtaaaatagaataccaaagcttcagctagagacaactcagtatatactaccacaaaatgcaacaacaagaaagggagtgaacgattagaaaactaaacaggatttttattcggctgttgcttcctccatgacttgttctgcggtagctggtgccacggggtagtaatggtagtgtagctccccaacatcatctcctgatagtttcgtccatccttcgggaccaacgtggtacacgctagcaactccaccactggctccatcacggaatgtcgcatggtagattgatctccttgctaactcggaagcttcttcaactgacatatcatatttgtacccgctgtccagcacaccgtaagcatatggtgaaccagaaccgactg

SEQ ID NO: 757 - DNA, 447 bp, Arabidopsis thaliana
tgaaaccgaaccggcacgagacactggagaacacgtggaacatgataactgaggagggaaaatcaacgccgttgacttgtcattaccggaaaaccagtatgtctggacttaacgccggcggcgatgtaaaacctgtcttgaggaaagcggagacgttcagggacgtgactaattatcgacagtcgtctccgacggtgacgtcaccggtgaagatgaagaaggagatgtcgccgagtagggaggagctgaatcgaagagtagaagcgtttatcaagaagtgtaaggaagagagattggagtcgctaaaattggagaaataagtggcttaattaaacacgagattaattagctttttgtcttaataattaattgttaatcgttttttactatttaaatgtcttttatattttgtttttttttatatggactacaagtaatgaagcaaaa

SEQ ID NO: 758 - DNA, 447 bp, Arabidopsis thaliana
ttttttttttccttttcactgtctaaacaaacacaaatatcagattaacaatgaccttgtctgaagattgtagcaactaaaaatagacctcagtgaaacaggtgtgaagcagtcattcacaaaccagaatcaaaaggctatattggttatagtatctcaacaacacctcggctcacgattttgccttcgttgagatcttgaaatgcttttcctgcatcttcaaacttgtatttacttgagactgcgtttgtgagattgaaaatccctgactctgccaatttcactactttaggaagatcctgtcttgctcttcctccataagatcctataacttttatctttctacgaacaagtcgatttatgtcaatttctccaacggaaccagcttgtgagagtccaatcatcacagcttttccaccatctttcacacttagtgtgcactgcatg

SEQ ID NO: 759 - DNA, 447 bp, Arabidopsis thaliana
ttttttttttttttttttttttttttttttttttttttttttttttttttttttttttttttttttttttacccaaagatatccagaactttttataaatcctcattgatctaaactctggactgtcagaaagaaaccaccaagtttaatagtaaaacaactacagtacaaagtgtttaacaacatcacataaaataaaataaaagcttccttaaaagatcgccagccgatgtggttgcttggcttcttaccaggagcctgcagcaccagcagttgggttgtggaatgacgagaattcccagtatgtcttcaatgagtatggctgtgagaccgtcacgccctcttccgtgatcttcgctatctgaagcttgttaatagcagatctgtcacggtaaagaagcacacgcatacatttctcaagtagcttgacaccatcttcaaaactca

SEQ ID NO: 760 - DNA, 447 bp, Arabidopsis thaliana
ccacgcgtccgtgctgatatgtgctccaagacaaatcttctggtgtttgctccttctggatgtatgacacagtatgcgttacgggaacatcaggttggtgttggtcatgagactgctgcaatgacggggtttgattctgagtcaggtctagagacagaaggaaaattagcggtagatccaataagaaggtggtccatgatccaaaaccaatctagaagagagacgcatgacccccacagtgacatatatggaggtggaacatcagtggattctaaaagtaaagtgtttccagaggttgttagaaaacaaagtgttgaggaagcttggaaagtatctaagaaaggaactacccgtgtggtggataagcgtcatttgtacatatatgaagcagaacaacagcaaacgcatctgccgactcagctacccttatgggcaaggcgaaagttt

SEQ ID NO: 761 - DNA, 447 bp, Arabidopsis thaliana
ccacgcgtccgcgatggtgaaactattgaatggcttcttcaacaagctgagccagctattgttgctgctacaggtacaggaactattccggcgaactcttctactttaagtgtttcgttacgaagtagtggatcgactctctctgctccgccgtcgaaatcggtgccgctttacggtgctcttggattgactcatcatcagtatgatgaacaaggaggcggcggtgtgtttgctgctcatacgtcgccgcttttagggtttcatcatcagcttcaacaccaccagaaccagaatcagaatcaagatccggtggaaactattcctgaaggtgagaatttctctaggaaacggtatagatcggttgatttgtctaaagaaaacgatgatcggaaacagaacgagaataaatctttgaaagaaagtgaaacgtcgggtcctacggcggcg

SEQ ID NO: 762 - DNA, 447 bp, Arabidopsis thaliana
ccacgcgtccgcgaaaagcctggttcttctgaagcttttattgccaaactgatcgaacagttgggaagtacaaaggaagtgtcagtgaaagaagtgcaagacatggcgatccgtgtgttcgctaagacaatgaacaatgatgcagagaacaaaagaaagcaagctagcaaagaatttagttctaatgcaaactttagtccacttgcaagattcttattctcaagatggctaggtcaaacatcgcgtgatcttaaccaaagttgagaaacgcacagaagacagaacataagaatgttgtttgtgtgtctcttacattgatttgatgcattgaattttggtatttatgtgtataatttttcttcagaaaaagggtgtatttataaaattttaagtttttttattttttaattggcattttctaccttaaaaaaaaaaaaaaaaaaaaaa

SEQ ID NO: 763 - DNA, 447 bp, Arabidopsis thaliana
tcaattaaagaataatttgacaaatcttttttctctcaccaccaaagaacaaaacaaatagacaacaactttcttcttcatctctatatctacaacacattcttgcaaaaataacaattctcgtaacaaaattaaatcttctttttcttttcatttttcatcatctaatgaacacaatgaaggagtcttttagaggtaaaacaatatctctcttacctctctttgatccgtgggaattaaacctttttcaccaacccatccaccggtcaatcgaatcacaagcagtctaaaccacagatctcgagaataggaccgcctttcgccacaaacggattaacccggacccaaagaagtgtaagaatcgaggccaggaggatggaccagacgacaataatggttggcattctatcttgtttcccaagcaaacctttaaggaacgggtaaaga

SEQ ID NO: 764 - DNA, 447 bp, Arabidopsis thaliana
  misc_feature (1)...(447): n = A,T,C or G
atcctctagagcggccgccctttttttttttttttttttttttttttttttaccaaactattacaatatatatttttcagatcatcccattataaattgggttattatatannnnntttctggtcataaactttccagaaaaagtaacgttacaaagtttacggaacaaaagaaaacttaaagagcatagtatgcttataagtttcccccggttcaattatctgcgaagaacgatattggtaattgattgcatgtgattctagacataaaccagagtaagctttatgaaccgatccattttttggtttagtggttttcaaccttagaccggattggtctgtagataactccatttttatcttcgatttattgtccacaagctccacgacttttctcatcttatttgcaacaccatctagacaataatttataccataccctgtctta

SEQ ID NO: 765 - DNA, 447 bp, Arabidopsis thaliana
ccgcctaaaagcgtcaggtcatacaaagatcccaagataatgaaacaaagcttaaacggagagtagaaaaaccatgagataatagacgaaatagtaaaactagtgacaactggctggaagcagaagctctctctcttcactcctctctgtagtctgggttctcctttaagatgatgaatccttctagtattggcgacagaggaatgtatttgtccgtggctagttcggctctctctccagcagccaggagaacaggtgtggagtgtgtctggaaaccggttatggtcttgggccgacccgcttgcccaaccacatcaactgcttgtcctacccgcactggcactgacagtggcttcaggttttcatccactgtcaacatcatccttggttgcatcgccaaaacgaggaagtacagcacataatggtacttcccgagtatgattggtt

SEQ ID NO: 766 - DNA, 447 bp, Arabidopsis thaliana
ccgagatcgatcactagtcacaccttgaagctcccatcttcgtcaacctcagctttaagatccatttcctcttccatggcttcttctttcaaccctgaacaagctagagttccctctgctcttcctctcccagctcctccgttgaccaaattcaacatcggattgtgtcagctatctgttacatctgacaaaaagagaaacatctctcatgctaaaaaagccattgaagaagctgcttctaaaggagctaagcttgttctcttacccgaaatttggaacagtccgtattccaatgatagttttccagtttatgcggaggagattgatgcaggtggtgatgcttctccttcaacggcaatgctttctgaagtttccaaacgtctcaagattacaatcattggtggatctataccagaaagagttggagatcgtttgtataacacttgc

SEQ ID NO: 767 - DNA, 447 bp, Arabidopsis thaliana
tccccatttttctgcaagttgggaaatttctgtcaaagttttgtgggtctgttaaaaagatctgagctttgaacatggggagctcaatggaggagaaagtggtggctgtgatcatggtcggtggtccaaccaaaggcactcgatttcggccattgtcgctgaatattccaaagcctctgtttcctattgcgggacaaccaatggtgcatcatccaatttcagcttgtaaaagaattccaaatttagctcaaatatatcttgttggcttctatgaggaaagggaatttgcactttatgtttcagccatctctaatgaacttaaagttcctgttagatatctgcgagaagacaaaccacatggttcagctggtgggctgtatcactttagaaatcttattatggaagatagtccgtctcatatcttcctgcttaactgtgatgtttgct

SEQ ID NO: 768 - DNA, 446 bp, Arabidopsis thaliana
  misc_feature (1)...(446): n = A,T,C or G
ctttttttttttttttttttgtgggtttttgtgcccgttaaacaaaatcatttattcaaacaaaagtccaacacgattaaacaagaagaatcaaattctagtttattccatcctttgcagtagtaaaaagggacttcactaatcacttgaaaagccaaatgatttagttttttttttgtttcttcgaagaaataaagaaagaaaccttcttttagcccgagagagctgcgttgannncactgtgaacttcaacaccaatctgtgcctctgctttctcaagatctgttgtggcagaagcaagtttctgttggaactcagctaaacccttttggacttggctagggtcaatgtggtcaagcggcacagcttccaccgcgattatgtcagcgacggaatttgcgtggaggaatgcaaaaccactgctcaagaagtatttcttcacgtca

SEQ ID NO: 769 - DNA, 446 bp, Arabidopsis thaliana
cttttttttttttttttgttactactactcactcactgcaactaaatcaaaccagacgagatcaaagcaccggggttttaatcgatctgttcccgcgtttgtggactcgctatatataacataacatcgaagctgcattttagaaagcaaaacaaaaaaaactggaaaaagcttactcttgatgatcattgatgatgatttaggcgtttgagatttcagcttcagggtggtaataaagcatctcattccacatcatctctctgatcattggttcctccatgttttcatctatgtccaaagagattgggacatgtgcaggcggattggatccaggatcaaacaaccccgccatgtacgggtgtaagagtgcatcggttacagagattctcttggttggatcaaacacaagcatcctctgtaacaaatctatagctagaggattggct

SEQ ID NO: 770 - DNA, 446 bp, Arabidopsis thaliana
  misc_feature (1)...(446): n = A,T,C or G
cttttttttttccccaagcaatttatttcaaatacattcctcaacattatgccgtatatatagagaatccgttaagaaagaaagaaagcaacattttgttgtgaactagttgtcgaaggctagagaagctgcattgtctagaaaatcttctcttgcattcttatcaaacggttcttcaccaatgtacaagtctaagattgatctacacaagagatggctcttcacactcccgacatggttcccctcaattgcaacgctgagtacatggcccggatcttttgtcaaatcaatggtggagtttcttggaatcttatactcatctttgaagaggctagtgaagctttgaagcaactcgtcattgtctgagccaccgaacttcttgagtctgtttnnnacagactcttggaaagcattacgcacggatcggatgttgagcggacgcgtgg

SEQ ID NO: 771 - DNA, 446 bp, Arabidopsis thaliana
taggcttgtttactgaaaagtctgaaacacatcacaccattgcatacaatacattcattcctgagcaaaggttttatacagaaattttgaaactacaaaaacccaaatcaaaacacatacacacacagagagacgaagaagaagcaatctaagatttttagggacatacagaaacaaagactgcaacagtagcgacagaaagatgaaaaacaaaacagtcttcgtggaaacaacacttgaactttttcttcagggtttaggatcttctgagcgtgtccagtccacgatcgactcgtctccagcttcttttccaggaacgattatgacaggagcagatttgcaattgtggaaacaatactcgcttacgctcccctgtagcacgcttcttactaagctcctgcctcgtgtgcctacaatcacagcagcaggcttcactttctctgctt

SEQ ID NO: 772 - DNA, 446 bp, Arabidopsis thaliana
tttttttttacctcaccaaaacctatattaatttttgtttaactgtgtattacaaaatgtttataaacttgacatcaaatgatatactcgtacacatacatctttatatcttcttatattcatctatcaaaaacaaacacaaaaaaaaagaatcagaaaaggggaaatcataaccaaagacaaaaaaaatatgatttgagagggcaaaatcatctgaatggctccactggcattgtttcctccaaagtaacggcggcttgaaaacactcaacggcttcttgcatcgacgagacggacccttcagctttgaacatctttccaagattgtaccaagccgagtggttcagcctatcaatcctaagagcctccattagaaagcttctaacaaccgctatgcctgatcggttaccgacctccagcagtatctcagccttcgatgttaagct

SEQ ID NO: 773 - DNA, 446 bp, Arabidopsis thaliana
ctttttttttttttttttttggtagataacttgtggattcttgatgttaagtttagagaaacaaagttgagtcacttctctctttctatgtattcatcaatctacaacgagtaaattagcaacaacaaaaaggaacagaacaaaacaaagatcagagggtctttgtgtatcaatagctctcattgttttcattcggaaaagattcgaacatcgcacgctggtttgagaccatttatcacatcactctgcttcacactctcgcacgcaataacaattggtatatgaaccttaaatcccaaccaatcaacactcagtttccctctcaagaacacatcaaccaaagcttcaagcgtcttctctttgtttgtcagcaatgtagcatcaacatcatacactttggattttctgagtcttgtgaggatcttcaaggaggtaacatttcccgg

SEQ ID NO: 774 - DNA, 446 bp, Arabidopsis thaliana
ctttcttcttcaattgacaaacccattcgtcctcttattcgatccacttcatgttacatgtcttctttgcccagtgaagctgttgatgagaaggaaagatctcgtgtcacttggccaaaacagcttaacgcacctttagaggaggttgatcctgagattgctgacattattgagcatgagaaagctagacaatggaagggacttgaacttattccatctgagaacttcacatctgtgtcggtgatgcaagctgttgggtctgtcatgactaacaaatacagtgaaggctatcctggtgccagatactatggaggaaatgagtatatagacatggcagaaaccttatgccagaagcgcgctcttgaagctttccggttagatcctgaaaagtggggagtgaatgttcaacctttgtctggatctcctgccaacttccatgtgtacct

SEQ ID NO: 775 - DNA, 446 bp, Arabidopsis thaliana
tcgagcggccgcccgggcaggtaccaacaccttgacacctagcagagaagtcaagagtctccttaacagtcatgataccaacatgaagatcgttctgactaatgtaagcagaggtctttctcggaacaaactcatcgagttggtaaccattgtaagtaatatcaccactgacttgtagagatttatcaagtttcccagctaaagccaacaaaagagtggtcttaccagaagaaggaggacccaacaaaagtgtcatccttccaggtttaataaccccagagatatctttaagaatcgtaagctgagctttcttagcaaattgaataccaatcatacctaaagcagactctcccatgttcctcacaacattcaaaagtgtaggaagagatctattaccagtgtaacaatcagctttaatcgtcaaatgcttgtacctcggcgcgacc

SEQ ID NO: 776 - DNA, 446 bp, Arabidopsis thaliana
  misc_feature (1)...(446): n = A,T,C or G
tcaccagccgcttagagccaatcatataatctcgattctcttcaacggtcctcaattatcctaaattcagatcataaaaacgctaacttttaatttctttctttctgagaaattggttctcatcgttggaatcgaaaaatgggacgaatcggtttagtagtgactgatctggtattgtcgttcatgtggatatgggcaggagttctggtcaacattttagtccatggagttcttggatttagccggaccgatccttccggtgagatcnnncgttatctcttctctatcatctccatgttcatcttcgcctaccttcaacaagccaccaaaggcgggctttataatcctttgaccgctttggctgctggagtctccggtggcttcagcagtttcatcttctccgtcttcgttcgaatccccgtcgaggtaataggatcaattcttgc

SEQ ID NO: 777 - DNA, 446 bp, Arabidopsis thaliana
ctgtctactggcctgccatgctaatgtctgctggtcttgaacttcccaagatggtgtttggccatgggtttctgacaaaggatggaatgaagatgggaaaatcgttggggaatactctagaaccgtttgagttggttcagaaatttgggccagatgccgtgaggtatttcttcctacgggaggttgaatttggaaacgatggggactattcagaagaccgatttataaaaatcgtcaatgcacatctcgccaacactataggaaatcttcttaaccgtactcttggtcttcttaaaaagaactgtgaatccactttagtggtagactcgacagttgcagccgaaggagttcctttgaaagacacagtggagaagctggttgagaaggctaggacaaactatgaaaatctgtcactatcatcagcgtgtgaagctgttttagagatt

SEQ ID NO: 778 - DNA, 446 bp, Arabidopsis thaliana
acccgggggatactttgttttaacttctcccacaaacaaagcacagggaaacttaccagataccaagaaaacgagcatctcaacacgggtgaatgagttatctaagaaaatctgttggagtctaacagctcagcaggatgagacgtttctttggcagaaaacttctgattcaagttgctattcttctcgttcgcaagcttctatacctctttgcaaagatggagatagcgttccgtattaccacccattggttccatgtataagcggaaccacgagtaaacgctggatttctatacagaacaggtctgctgttgcaggaacaacctctgccgggcttgaaattcatggtttaaaaccggaagaattcttcgaggatacacaaatatggagatcagctctgaaaaactattggtccttgcttacacctctaattttctctgaccatc

SEQ ID NO: 779 - DNA, 446 bp, Arabidopsis thaliana
aatgaaatcggaaaacagaacaatgaagaacaatactcttcttttaactttgaatctataacattatgaacacaacaagctcaagatcaacttggaatatggctttttaaaacaccccaatagcaaaaagtttcagtctttaaattctttctctaaacactgaactgaaactattccaaactaggagccacttctgttgggttggactcaaacacatcttcagagtttgaactctctgcttcatcaagaaggtcacgagattgaatcgcctctttatatactggcgtctccttgaaatccgtcgcaccttcgttatacgtccccgccgcaagtccaccagagattagcgcgaaaaggattccgaaagcccacaagtactgaacgaagaaacctagaccatcccacttctcaccttcaaaaggatctggttcaagtccaggaagatc

SEQ ID NO: 780 - DNA, 446 bp, Arabidopsis thaliana
cctccccggttctctttcttcaatcgtaccaaagtccggtccgacgtgatatttatatacatgccggttatgaaaaccaccataccgataacaaaccgccaccagaaccagtttccgtcttcgtagtcatccttgtaatgcgaaacccacctcgcctggatataaccattgaggagattaaaggtgaaagccaaggcggcgatggtgatcggaaatccgtttttaccggcggggaaggagctgcggaagaggcgaagagggtaaatgatggtgcggtggaagtaatgaatgagataaggagagaatagaagtagagatttagggttgagagcgtgacgaccaaaggggaggaggaggagagtgagccacaaggttgggctctccatgacgaaccaagcaatcggtggagatacggtgggaccccatccggtacctcggccgcgacc

SEQ ID NO: 781 - DNA, 446 bp, Arabidopsis thaliana
ttttatttgttgagaaatgtccagttcatatacatttagaggttcctcatgagaaagccttcgaaagtgattcccggtccgaaagctaagcccagaccccactcttctccctctgtgcctttcttctcaagctcatctctgactttgtccattatgtagaagatggtgttgctgcttacgttcccataatccatcaacgcccttctgctgcattccagcttttccggcttcagcttcagctttgtctccagcccgctcaggatggctggtccaccaggatgaactgcccagaaaaggtcattcaactccaacgcaccagagccagcctttgccactagcttcttgcagaactcctccacgttgtcttcgatcttctgagggaggtctcttcctagcttgaaggttatgccctcttctgacagccgcccgtcgatcaccccctgtgt

SEQ ID NO: 782 - DNA, 446 bp, Arabidopsis thaliana
tttttttttttttttagcatacaaagaagatttatttgattaaacagatgaggaggttcaaacacattatgacaaatgttaaaggagttttggggcataaagtaacaaaaacaaaacacaaacgaattcaaaagattcactaaaacaaaaactaccacaacccctaaaaataagcctctacttaacttcatcacaactaccctcaagatagaggctcatggcttctcgcaatgcaaacaggaactcctgagagagacagacagagacagcagaagaagatgcaagtaacagacattagaaagttttggaggttgataaacgaacgatgcgggaaactcacaaacatgcagccttatttacatgaaactggatctcttcagaagactcctccaatcatggaatgaatttcatcaatactccataggtccatagggtttgcaccattg

SEQ ID NO: 783 - DNA, 446 bp, Arabidopsis thaliana
tttttttttttttttcataaccattcaatcacacaaaaccggaaaatatagaaataaaaacatccaaaagtacataatctattaatgaagataaatagttagaaccttctaagttttgtagagaattttaatcttgagctatataattattattggggtttagaccaatgcaatgctgctttctccgcctggtggtttacgaacaccgccaaagtagtcacgagactgagccttcgcatcagcaaatatgtcattgccacttatctccttcaacttcgccgtgcttagaagcctctcagccgtggcggaagagggagacgaaacatcgcttttgaacacgttgttacccgacaaatctgtaaacttcctatccgcaatcttcttggccgtctttagttccccatcgggtttggtatcggattctcccaagtcgaagttgtctttat

SEQ ID NO: 784 - DNA, 446 bp, Arabidopsis thaliana
ctttttttttttttttttttttttttttttttttttttttcttttttttttttttttttttttttttttttttattctgacatggctggttatttaaattataaggaaacacaagaagaagacaaagtttttatgatgtgagtacagaagcgtcaaattccagatgcatcctaggctgaatccgcatttcccattttcttcatggtctcaagtctggggcctttgtctccaaacttggtagttgaataaagctttaggtagtcttgaaaacggtagccacttggatacaagagctttggagctggagatattatggcatcaccagccggattgtaaaacgtagcaatcgacagtctacttccatgcttcactgtcattacacggtgaacaacactcttgtacctcccattactcagtatctctagttgatcaccggtattgacaaa

SEQ ID NO: 785 - DNA, 446 bp, Arabidopsis thaliana
ttttttatttaagttccattgatgtatttcaaagggttcagagttttatcgttttacaaagaaatgatgagtgttcatgactgtaaaatccaccttcatcttccactttcagtttaacggctccggctctggatccggctccactactggtgctatgcaatccaccttatatcgaagagtctttttgaagaaagttgaatatgaattatcccaaacaagtttgtagtttccagccattagcgtagagaagttgccctggtcagcttcataccgacggtaaggtaatatcagagtcttttcccctgaagcatttatgtactccacgctaaatccgatatccatgcttatcttgccttgcatcaaagagaaatcccaagcaatatacgaattttcagattccaccatcaatgagatctcataggttctcccagcttgaacgattatct

SEQ ID NO: 786 - DNA, 446 bp, Arabidopsis thaliana
  misc_feature (1)...(446): n = A,T,C or G
ttttttttttttttttttagttgatgtttttaattaagagttaatcttattacaataaagaaattttatatcaacacttatatagggagaacaaaaagacactgtactgtatctgtgtttttaaacatgtaatttaagaacaatttatgaccataccaaaatcagaaatcaactatatggttggatattgagtcttggcatgtctaagatagnaacatttgatccttttanangcttcttcaatcgaagttgcatctgctgcaaacgttatcctcagccagttcttcagccccaccgcggtcccaggaagaaggatgactgattcttccctagctaacttgaaacagaagtcgatatcgtcacttacatcttcaagtaatgagagattcagcttaaccatcattgccatggatccttctggtcgatgcgaggaatcaatgcaagga

SEQ ID NO: 787 - DNA, 446 bp, Arabidopsis thaliana
aaattcgagctcggtacctcgagcggccgcccgggcaggtcgagcggccgcccgggcaggtgaagacttcagaattgccacaaccacgaaaatgcctgagcaagggacttgtgagcgatgtgggtatatttctagccagaaatggtgcaaagcttgtgttttgttggaaggattgaaccgtggtctgcctaagatgggcattggaagaccaagaggaaacgtaaatggtgattataaggacataaaggctagatctactgcaaaaactatagagagcaaacaatgtggatctctggatttctaaattaagagaaaaaccaaagctatgagactgcaatggatgctgtgatagttgccaaactgtttttgtacagaaagctgttaaacttaaaaacccattgttgtaaaacttatcctagtagaagaattatgggtttccctttatg

SEQ ID NO: 788 - DNA, 446 bp, Arabidopsis thaliana
  misc_feature (1)...(446): n = A,T,C or G
gcccttttttttttttttttttttggtacaaaaatatgatccatcaagcagaaaacatttcaaacaacaaaccctcacaagagtaaacccccttaaaccctcctttacagtcaaagtgtctttgccacaaaactgaaattatgcctttttttgcgcaaacatattctcatacttaaactctttatccctctctctctgcttgtttcaccaggaatctgtacattgccaaaagccaaatagaaacagcctttggcgattttagttctcagcttccagaaataggctgagttccacatacctctcctgtgtagacgatcccgagtctctccgacctcttaagctcaatccctcatcagtttgtgaagagtttggtgcaagnnncagagcaccactgcgttcttcggtcacagccgtatcctcatcatctgtgtctcttagacctctca

SEQ ID NO: 789 - DNA, 446 bp, Arabidopsis thaliana
ggttcaatttcatccaaatatgttctacacgaatacatatatactatatgtaaaattcaacaatatcatatacaacgaaacatttacatcaacagataaataaatttgttcacaacccaaaaacaactgattaaagctaatcacaaactgaaatctgtcaaaatccaacacgcacactacacttgtgttctctacttagacacccctccctgtcatttggaactgaataaatgaatctctcagaccagtgagtcttccgatatgacagtgagcagagagtatttagctttgattgagatcttgcctgcctcaacacaaagtttagcaccagtcacaacccaatatccaggttgttcctctggacctctcatcacttccttcgtgtctacaagactcagcaactttggtttcacaggcggtgatggccctctaggatacactgcaga

SEQ ID NO: 790 - DNA, 446 bp, Arabidopsis thaliana
tgtctctctctgtttctttgtttcaatccgatttcgaatcaagccctttacttgtgcaccttcaagatttcgtttttccagcgcagccaatgctccgggtgaccaacatttgttcctgattcatttcctattgattcgtattgtctgtgcacacaagagaaatttcaagaagttgttactaaaagagaggccacaagtggatattgtctttgttatcaagtgttagtacagaaaagtggtgagaaagtaatatggctgataccagtccgagaactgatgtctcaacagatgacgacacagatcatcctgatcttgggtcggagggagcactagtgaatactgctgcttctgattcgagtgaccgatcgaagggaaagatggatcaaaagactcttcgtaggcttgctcaaaaccgtgaggcagcaaggaaaagcagattgaggaag

SEQ ID NO: 791 - DNA, 446 bp, Arabidopsis thaliana
cggccgcgcgttttcgaatcgtcacacctggagaaggaagctaatcactttctcattttggaactttgaggagagatctgaaagttttttttttttgttgttgttctggatcgttcctgttccactctcttcatcttccgatcatcgttattttcgaagctctctacaaacaaaatcgattttttttctggttaatctaaagaggtgaccgaaagaagaaaacttttacgttttgcatggagtaagaatgccagagttaagaagtggagcaaggagatcgagacgccttgacgagcagcctaaccctccgctagttgaacaagcagaaaatatcgtacttcctcctcagactgcaacaaggagaagaggtggtggtagaggaagggggaatgctgctttagctaaaggtgcggcacctccaagaccaactgctgccggtaggggca

SEQ ID NO: 792 - DNA, 446 bp, Arabidopsis thaliana
  misc_feature (1)...(446): n = A,T,C or G
aggagaagaagcacaagaaggataaagaaaagaaagaaggaaaagagaaaagggaaaaagaaaaaaagcaaagacaaacataaggaacggaaggagagaaaagagaaacataaagataggaaagacaaagatcgagataaagaaaaaagcagaacttcagaggacagaaaagctgctggtgttttgtcaaacaccggggacagagaaaaacttgtaacaaataccttgcagagtaatggtaacggagagtctaagtttatacaggacctggcaagaaggttcggaaatgaagaagctacagaaagtcaaagtccacgaaagattgattttccttgtggagttacagagaataacaattcctgctcaataccncaaaccaaccgtacaaaagttgacgagaagagaaacagtacccatagaaactctgctatgtcaaaaaagtctga

SEQ ID NO: 793 - DNA, 446 bp, Arabidopsis thaliana
atatataaaatctagccaatattcacaaataataactacttccttcgttcttttccttaccaaaagatccacctcgaacctctctcctccgtcttcctccgcagccgccgtcactatcaccgcagctagaatgagagaagataatccaaattggttccttagatgggaagaagagcttccatctccagaagaactcatccctatctctcaaaccttaatcactcctcatctagctctcgctttccaaatcggaagtcctaatcatcatctcggatcaaagagaaccaccgcgatttatcaccagaagcttcaatcctccaccactccaacaactccaactccaactcctccaccgatgatgatgaattctgatttcggcggtggcgattccacggatcttggttcaggatcaataggaggagagccagcaagaacgttgaaacggc

SEQ ID NO: 794 - DNA, 445 bp, Arabidopsis thaliana
ctttttttttttttttttttttttttttaaaaagtcaacaaatcttcatagacattttgacttttcttaccacagttaaattttgtgagattgcttgcttgctctcaattgaatctaattttctctacatcaaaaaatttcaaatacattcatggttccctggaagcttccagagacattttagagccgacttagaaccttctcggccgctgcgatagtgaattggatgtcttctgaagtgtgagccaagctagtaaaaccggcctcgaattgagaaggtgccaagtagacaccttcttccaacattcctctgaaaaactttccaaacttctctgtatcactcttctttgcatccgagaaatcatagacgggtccttccgtgaagaagaaaccgaacatcccgcttatgtaaccgccacacatcgcatgcccggttttcttcccg

SEQ ID NO: 795 - DNA, 445 bp, Arabidopsis thaliana
  misc_feature (1)...(445): n = A,T,C or G
gaccaattccggtgcagctaagaaccagagatagagagatagagatgcggaggatcaattcactgtacggaagaattggtctcctaaaacgagtacccgagaaatctacgaagcaagctcatacatttctcgcatctctctccttctctacggaaggtgcttatggcggtgacggtgagtttcagcagaacagctccaaagtcaagatctttgaccgagacctcaagcgaatacatcgtgatcgagcggcgtggctttctcgccaaaaaaacgattcttttgttgacgctgttgcagataatctacttgatcgcttagaggattgtaagaagagttttcccactgcattttgtttgggaggatctcttggtgctnnnaagagattactacgtcgtcgcggtgggattgagaagcttatcatgatggatacttcatatgacatgat

SEQ ID NO: 796 - DNA, 445 bp, Arabidopsis thaliana
  misc_feature (1)...(445): n = A,T,C or G
tatctacaaggctcaagatgcacattatgatattgccaccactatgatgaccatgaaatctcacatccaagcacttgaagagcgtgcaaatgcagctactgttcagaccacaatatttgggcaattggttgctgaggcattaccaaagagcctccactgtttgacgataaagctcacatctgattgggtaacagagccatctcgccatgaactggcagatgagaacagaaactcacctagacttgtcgacaacaacctctaccacttctgcatcttctcggacaacgtgattgccacctcggntgttgttaattcaactgtctcgaatgctgatcatccaaagcagcttgttttccacatagtgacgaatcgagtgagctacaaagctatgcaggcctggtttctaagtaatgacttcaagggctcagcaatagagatcaggagc

SEQ ID NO: 797 - DNA, 445 bp, Arabidopsis thaliana
  misc_feature (1)...(445): n = A,T,C or G
gtaattgctattgtaaaatcaagttcaagagtttcccacgccagattgtttctgttcccgttctgttgcgaaccgaatcggaatcagagtctcggtgttgttccggtaacgtcnnnaccgtcgctgcttgctttagtctaagtaagtctcagattgagacgtctcttaagaaggctaaatggagtgttctctccgtcgaggtttactctcgccgtagtgcgtcgtgtggatttgtcgctgcttccggtgagaagctgattggtcggtttcaggttacgcttgatttgaaggcggcggagtcaaagacgtgtttggcacacaacggctgggttgatttgggcactaaatcgaagaataataagaagtccgggtcggatcctgagctccacgttagcgtacgggttgaacccgacacgaggtttgtgtttcaattcgacggcgagcc

SEQ ID NO: 798 - DNA, 445 bp, Arabidopsis thaliana
cttctcttccttctttgtcggatcgtcaggtttacagatcagctcttgtggaggatatgggtgaagaagacaccgcgacggtggatcagaacagtttcggtggtggcaaagattcattgcttcgtaatcgtcattcgtcgccattgccttcaccgacacagctttcttctaaagtgattacattgcctaccgtattaacccttggccgtgtagctgccgttccgattctcgtcgccaccttttacattgattgctggtggggaagaactgctacgacaagtattttcattgcagcagccattacagattggcttgatggatatattgcacggaagatgagattgggttctgaatttggtgcatttttggatccagtggcagataagcttatggtagcagctacattgatattgttgtgcactaaaccaatggtcgccgttgtctt

SEQ ID NO: 799 - DNA, 445 bp, Arabidopsis thaliana
ctttttttttttttttttgaaactgtacatctaaaacattactgaaatgcaaaaaaatatccaaaacaatatttaagtatcacaaaacatcatttaaaataatactctagaaaatagagaataaaagtaaaaatccaaatcaaaccggagtaggtgtagtattagcaccagaaggagaaggagatcgtggctcaactctcctaagctgaatggctttgtgagactcatcatcatcaaagtacatataagcaaaaccaccgtgcctggtcatatccataccggccatctcatcctcggacgatatccgcaacaatttcattttcttgaggatgaagaaaagtgtccccatggtcgcacttacccaacccgtgatcacaatgatctgaatcagctgagctccaagtagttttcctccaccgcccataaacaaaccgcggacgcgtgg

SEQ ID NO: 800 - DNA, 445 bp, Arabidopsis thaliana
cggccgcccgggcaggtcttgtttagggtaagctcaaagctcaagccgcttctatctctctacatttctctttctgcaatggcgagattagtgcgtgtggctagatcctcctccctctttggctttggtaaccgtttctaccctacttcagccgaagctagccacgcgtcgtcgccttcgccgtttcttcacggcggcggagctagcagggttgctccgaaagatagaaatgttcagtgggtgtttttgggatgtcctggtgttggaaaaggaacttacgctagtagactatcaacccttctcggcgttcctcacatcgccaccggcgatctcgtccgtgaagagcttgcatcttctggacctctctctcaaaagctatcggagattgtaaatcagggaaaattggtttctgatgagatcattgtagacttattgtccaaaagac

SEQ ID NO: 801 - DNA, 445 bp, Arabidopsis thaliana
ggtcgcggccgaggtacaacgtagacatgtgataacacaagtagatgtattgcaaaatcctccatatcttgtttctcatagcaagaagagtataagaatcgaatgaaaactcgaacagcgtcgtgaggaacaccgaggattgaaatcgatttacgatgagattttctcttatgttgcttcatcattcctctgattacatctgaagccattccgatgacattagaatgtgcgtaaatcaaaccattatcatcagtatgaatcaaaacatcagctccatgagcttcgtcgaacatacgatcccatgaatctctcgtagctttagaaacaaagctattgcttctttgcataaacagatccgttgacttcttcattggaggaggtggtggtggtggtgctaaaacattctccggtgagaaatcgtccacctgcccgggcggccgctcga

SEQ ID NO: 802 - DNA, 445 bp, Arabidopsis thaliana
tttttttttaagaaaaagaaacaattgtatttgaaatgcataatcaaattcttattagtatttgataacaaatcaaacacatggaggtaggtacaagttctttgcttagagaaaatctaactcgggaagtacttggttgaagaaatggcctccatttcaacttgaaccatcaacacatcgttcttaacgaaaccctttgatgaatctgtgagataagggaaatagataaactcagggaaaccccagctatattctccatatcccggaccattgtaccaaatatcgagttccctttcgatgttactgagattgagttggttaagagctcgaagcttggctcggacataaatcttctcatatggtctgaatatctcattcacattaaggccaagatacatcgacaaagcttttccctctcccgtacctgcccgggcggccgctcgag

SEQ ID NO: 803 - DNA, 445 bp, Arabidopsis thaliana
ccacgcgtccgaaaagcaaaatcaaagacaataattttttccccgagagagaaaatgcagaggttgaagcagcagcagcagcagcaacaagttatgatgcagcaagctcttatgcagcaacagtctctctaccatcctggtctccttgccccgccacagatagaaccaatcccaagtggaaatctcccccctggttttgatccaagtacttgccgcagtgtgtacgttggaaacatccatattcaggtgacggaacctctgcttcaagaggtttttgctggcactggtcctgtagaaagctgtaaactaattaggaaagaaaagtcttcttatgggtttgtgcactactttgatcgaagatcggctggtcttgcaatcctttctctcaatggaaggcatttgtttgggcaacctatcaaggttaactgggcttatgcgagtggcc

SEQ ID NO: 804 - DNA, 445 bp, Arabidopsis thaliana
ctttctatatcggcatcgccttcgccgccgtggccacttctctctccgccactatcttcatcgtcgttaaacagagctgctccgtctattttttcccctttctctcgaatcaaccatggcttctcgtgctctttcatcgccgttcaacgcttcgctctaagccgcaagacaaggaagcagttacaggtggtggctatggctcctgaggaagagaagctcactcgtcgcaatcctctcgatttccctatcgaatgggagagaccaaagccagggaggagaccagatatattcccaaagtttagtcctatgaagtcaccgttgcctcctcctatgccttatgatcctccagaagaagaggaagaagaggaagagaagaaagaagaagaaactgaagatgaccctgaaaaggaagacgaggaccaacccgataaccggtcgtaagagg

SEQ ID NO: 805 - DNA, 445 bp, Arabidopsis thaliana
tttttttttttttttttttcacataaatattttttttacgttacatatgaaaacattacacaatcacaccattaccatacataggaaaatacaaagctgggaaaagtcaaagcttaagagagttgatacgcaacacaacggtcacgcctttattccaacaacacacacacatctcttagcataaaacacatattttccccaatttttctgccatatatatgattttagaccataataatttcatcaacagttacagtttgacccacagctgcagtttgatccacagctacagttgtcgcactccttgttgtagttcttctcgcaactgcaagagtcaccacatttgcaggaggagccacatccacagttagaatctgccatttctcttacttctctttgattgattaactattgtagtttcttcttcttcttatcggacgcgtgg

SEQ ID NO: 806 - DNA, 445 bp, Arabidopsis thaliana
tttttttcaccgacaaaaacaataagcaatacacgcaaaagtttaacaaatccagaaccgatatagggtttcaataacaaaacgaacacacatgaacgaaacaataaaagagatattacgaagaaaaaaattcaggataaggggaaagaagaaagtgaaagctgcttgcttacacagcttacgaatccgagggagccattgacaacatcttaagtctcgtactcctcttcttcctcctcgtactcctcctctccggctgtagcatcttggtactgctggtactctgcgacaagatcattcatgttactctctgcttcagtgaactccatctcgtccatgccttctcctgtgtaccaatgaaggaaagcctttctcctgaacatagctgtgaactgttcgctcacacgcctaaacatctcctggattgaggttgagttaccaatga

SEQ ID NO: 807 - DNA, 445 bp, Arabidopsis thaliana
  misc_feature (1)...(445): n = A,T,C or G
cctctagagcggccgccctttttttttttttttttttttttttttttttttttttttttttttttttttttttaggacatagtctgcttcctttattctggaaaacagtatcaaagaaaattacaccatgaatctgttttatttcaaagaaaatctacctcatcctaatccgatcttttaacagttctacaattacctttgtaatacaaaaaaaaagaaacacttttaagcaaagcaaaaagcatcacagtttagaaggaatggggttcgaggctgcgatttccgcatacattttgctaattgcttctgcaaagtaggcttttgcttgaggtctctttatcttgaatgttggtgtgagaagtccattctccaagnnnaatggttctggcaccaaagtcacagcctttgcaaactcaaaccctctcaactgagcttctcttccaag

SEQ ID NO: 808 - DNA, 445 bp, Arabidopsis thaliana
ttggatcctctagagcggccgccctttttttttttttttttttttttttgagaaaatattaccattgatatttactatatcaacatgcattattcaacttcaacctattttcaacatcaactaacagcccttcgaaacaacatttcaatccaaaagaacacacggtatgtccaatgtcctgcacgtagtcattgactcattgttcttacacttcaagttgataagaccactactctcttactcttatgtcctgcaacaactctccaaagtctgtcgtacccatctctgtaatggtcaagagacatacaaagctgtcttatagcttctcttttctgctcagccatttccgatgcagacactctcgtcctttccacttcttccgtaagctcacttgaccgtcttctcagcctcacttgctccatgtgaagctcctccatatgctttt

SEQ ID NO: 809 - DNA, 445 bp, Arabidopsis thaliana
gcggccgctccggttaatcgattcaagccaagaacctcgcaacacgcatatgctattcacaacattccatggaatcaaacatgattaaaatatcaataatccccattccccaatatagtttcaaactgcttctgctccacttcttgacgcttccttttgtattaacttcaaaaccactccgtactactatagtaatttataacgaacaaaatctatattagaaaaaagtaaacagcttatgtcgactgttttgcaattgtccggttagccatggcaccattagtaccaccaccatcggttccttcctctttctcttcgtcgatggttttccaaacaatgtccttaagtcccgtggtaaggttcttgtaaaacttgtggaattccaatgtgtcaccccctgattttcgcatttcaaccatgtaaagagatggagcaacttgaaaaa

SEQ ID NO: 810 - DNA, 445 bp, Arabidopsis thaliana
  misc_feature (1)...(445): n = A,T,C or G
tttttttttaactcgaaattacgattttattatgtggaaaatgtatataacgtcatctataattaacttctatattagggtacagagattgacttggatagttgagaaaaatacttacaacatatcacacgagaaaacaaaattttcaaaagaaagaacaatcacaagcttcantattattattcaaaataaaataaaatcattgtatcaaattgatcactcgtttattcgatnnntaataatatctccgctttggactatcccataaatcgagtatagcattattagtgtcgtttctaatacgtgcctcgagctgtaacgccgccatctcatcttgagccttcatcaacgatttcatccttgaaaccgcagagctcgcttctccttcttccctacctcctcctcttttctctgactcatgatcttcatagaccgcgcaagaatg

SEQ ID NO: 811 - DNA, 445 bp, Arabidopsis thaliana
ttttttttttttagtcaataaaacacattaatactaaatacatataatcctcaaaagtcaacataacaaatccataaggaatgagaaaacaactctaccccaagagaaaaaaaaagtacgaatgaaagaagaagatcatttcacgtacgtatgatcccaacgtttggtaataccgcttctaaacgcgcattgcaaaacgctaaccctctcttggatgattgtttcctttacaccctctatcactttctcttcttcatccattatcgattccaagtcgtctagaaacttcaacttgctctgcagtttcttcagctgttgttctattactgtcgcagctaactgttccatttctctttcttcttgatcagccagtattttcgcttgtgcagccgcagctcctagagctgttgccacagacgctcttatccttaacgctacaggtaga

SEQ ID NO: 812 - DNA, 445 bp, Arabidopsis thaliana
ccacgcgtccgatctagagaaaccacttcgcaacgatgagggagataggtcactcctcaaaattaccaaacacaaattagctccaataattgcaacaaatcactctcacccaaacaaaacttttcaaaagccctaatccgagaaatcattcgacaacaacacgaaggagatggatctagaagattgggaaatactccccaaaatcaactacaagggtctcgaacttgatctcggtcatgaagaggatcatgaagttacgaagatgatgagaaacaccgcaaaaagcttcgacagtgattacttcatctgcccaattcaagattctgtcggaaagacagagtttcttcatcagagatctagcgtggtccccacacaactcctccagattccaataacttgggaacctttgtcccccgtggacgacaaagatcacaataagtacctg

SEQ ID NO: 813 - DNA, 445 bp, Arabidopsis thaliana
cggccgcttcaaagaggcgcatgagacttggcagagttaagaaggtacagctctcggattctgttcaaggatataagagtcctttacgagtgaccaaacgcgctgatagctctagtaatgaagctgctgttgctgcaactagttattctgatgaacttgatttccagccttcatcagggaattccgaaaattggatggtgttatcggttaatggcgaaaaacccgctccacgctttaatcatgcagcggcgactattgggaacaaaatgatagtagttggtggagagtctggtagtggcttgttggatgatgtacaggtgcttaactttgattcatgtacatggtccaccgcatcttcaaaagtttacttatcgccgagtagtcttcctctcatgatccctgcttggaaaggccattgcttggtctcttggggtaaaaaagtgct

SEQ ID NO: 814 - DNA, 445 bp, Arabidopsis thaliana
ggcttggatgggatactaaagctgattcacttatcgacgcttttaaacagtacggagagattgaagattgcaaatgtgtggttgataaggtatctgggcaatctaaaggttatggctttatcctctttaagtcaaggtctggtgctcgtaacgctcttaagcagcctcagaagaagattggaactcgtatgactgcgtgccagctggcgtctataggacctgttcaggggaaccctgttgtggctcctgctcagcatttcaatcctgagaatgttcagaggaagatttatgtcagtaacgttagtgcagacattgatccgcagaagttgctggagtttttctcaaggtttggggagatagaagaaggtcctttggggcttgataaagctactgggagacctaaaggtttcgctttgtttgtctatagatccctagaaagtgccaa

SEQ ID NO: 815 - DNA, 445 bp, Arabidopsis thaliana
tcaagaccatcgctttcgcctcattcgccactctcctcggactaataacaattacactcacagcatcgtttcctcaactccacccagcatcatgcaacagccaggacccactcagttgcggcggtccgaataagctccagatcggagttttgctattgggactctgtttcctctccgtagggagtggaggaatacgaccttgtagcatcccttttggggttgatcagtttgaccaacgaactgaggaaggggttaaaggagtggccagtttcttcaactggtattacatgactttcactgtggttctgatcattacacagaccgtagttgtgtatatccaggatcaagtcagttggattatcggttttagtatccctaccggactcatggctcttgcggttgttatgtttttgccggaatgaagcgttatgtctacgttaaacca

SEQ ID NO: 816 - DNA, 445 bp, Arabidopsis thaliana
attggctcggactagttgactaagattttgaagtcgatttttgtgtatattgtgtaagataagcaaatgtcttcttctacgaaaggatctgttaagaagagttcgattaaacatagttgcaacttagctgaggttaagaggaagctttcaaagatcagtgatcatcattcacatgtagagtatgcttatgccttccagagggacaatagagaaagagtagatactaggttgagtcaaatcctcagtagggatgcgttgatatcagccgttgatttgttgtgggatcgctcgggttttgtttcactgaaagaagggaattttgattatgtatatagggatgaagttagttcacagtctcaattgtcatcgactccacagtctagggttagattattgggagtggctgaaaagatgtacagtttcgatccgtataaccgaaaaagtt

SEQ ID NO: 817 - DNA, 445 bp, Arabidopsis thaliana
gggcgtaagtaagaatgttttatcaattaataatatcatatcatatatctatgagagacccaaaaaaaaatgaaattacaatgaaaggaagatcgagttcttacttctttggtgaatatttgcacactcttttgatccattgcccttcttttatgttatctgtggtcttctcgaggagtaatgcttcgtatactaattacacataacaaacctctaatcctcatctcatttccttgctctgtccaagtcaaatctcttcctatttctctttctcggctattgcgaattcagtggaagagtgggcattcctttcgcgtgttggctctccatttccagtagcatcaacgacttttgcctctggtatctgtttctctttgctgctagcgatgttaaatcgtgaggaggggcaaagtcataatcatgtcttcctctccagatgcaacac

SEQ ID NO: 818 - DNA, 444 bp, Arabidopsis thaliana
  misc_feature (1)...(444): n = A,T,C or G
atcaagatttggaactacacactcggagatggaaaggaggaggtattcaaggagaggagagagatagacgatgacaataagatagtgaaggttgtaggattggaaggtcacgtgatggagcagttcaaggtgtatgagattgacttccaatttattcccaactctgaagaagattgcgtctgcaaaatcactatgatatgggagaagcgcaacgatgatttccccgaaccaagcagctacatgcaactcctcaagagtatggttattgatatggaggaccacgtccttaaagcttaatcaatatcacaaccaccaccatcatcacaaccaccatcaccatcatcctatatatttattaaanngtttncanttatatataatagactagataagaacctgtataatgtgcgggataaaatgattgaaataaattattatgtataa

SEQ ID NO: 819 - DNA, 444 bp, Arabidopsis thaliana
cttttttttttttttttttttaatacttgatcaattgagctttttgacattttttttccctctactgcaaatcctacattgattccatctacaaagcctttttcacttttttacctttcaagtgggtgagagaggagagaagaaaccagagtcattagagcagaagaaaaacccatgttggacagttggattagctgtacaaactctttattgcagaaatcctactgtggaggattgttctcaggcttgaccactgaagatgtatccggaggttgagaatggtaaattgccattgccaatgagattggcatcatacaaagagcctttgattgaagaagctgcatcgcggctccaacgttctcttccatcagtttagccacttgacgttcagtcccatcgttagaccatttctcccacgctggttgcggagtccttccaccctca

SEQ ID NO: 820 - DNA, 444 bp, Arabidopsis thaliana
tcgagcggccgcccgggcaggtgaaattttgctccgatgtcggcggagagttgtttcggaagctcaggtgatcaaagcagcagcaaaggagtggctactcatggtggtagctatgttcagtataatgtctatggcaatctcttcgaagtttctagaaagtatgttcctcctcttcgtcctatcggtagaggcgcttatggaattgtctgtgctgctaccgataggacgaagaggaggtagctatcaagaagattggtaatgcttttgacaatattatcgatgctaaaaggactttgagagagattaagcttctcaagcatatggatcatgaaaatgtgattgctgtaaaggatataataaaaccaccgcagagagagaacttcaatgatgtttacattgtttatgagcttatggacactgatctccaccaaattattcgctcta

SEQ ID NO: 821 - DNA, 444 bp, Arabidopsis thaliana
gaaatgaagatacgctgtccttgcaacaccacgtgcaagcagtctccccgatggttcttcagcagtattctcctgaaaccatagagccaatggtggttgacatctccatggccatttcattgctaacaaacaagaaatctcgggatctgatcatgatcctcaactccaaaagattcctagataggcttgtttcagagctggaggagaagaagcaccgtgaagtgaagttaagagagagcttgaaagatgtgggtagaggacgcatggagctgcagaattcactttctgctatatggccaaaacaggaagctgcactttcgaaaacaagagaactcaaggagctatgtgagacaagtctctcttccatgtttgatggaagacctgtgaatataagaggagagatcaatacattgttgaacgctggggtttctgcttagtttgatc

SEQ ID NO: 822 - DNA, 444 bp, Arabidopsis thaliana
gccgcccgggcaggtcgaggatgcaactgcttttgctgttattgttgatttagcaaacaggaatctcctactcttgtgaaagatccaaggtttggacatgtgtacactagctactatgatatatttgtcacgcagcatgatgttctaagagatgtagcacttcgtcttagcaatcatgggaaagtaaataacagagagcggttattgatgccaaaaagagagtcaatgcttccgagagaatgggagaggaacaatgatgagccatacaaagccagagtagtttccattcacacaggagaaatgactgagatggattggtttgacatggaactccctaaggctgaagttttgatactacacttctcttctgacaagtatgtattgcctcctttcattgctaagatgggcaagcttagggcgctcgtgatcatcaacaatggtatg

SEQ ID NO: 823 - DNA, 444 bp, Arabidopsis thaliana
  misc_feature (1)...(444): n = A,T,C or G
ccacgcgtccgcgacctggcacaaggttactttgtactgttgaaggaacatacttggttcaggaagcaacacaaggagggatggaggagagagatgatctaaaggagaataatgagattgattttgtcaatttttcctgtgagatgcctattgcaagtggtcgaggtttcatggaaattgaagaccaaggtgggctaagcagtagtttcttccctttcatagtatctgaagacgaagatatttgttctgaaatccgaagactcgaaagcacattagagtttactggaactgattctgcaatgcaagcaatggatttcatccacgaaatcggttggcttctacacagaagtgaactcaagtcaagacttgcagcatcagatcataatccagnggatctgttttctttaatacggtttaagtttctaatagagttctcaatggacc

SEQ ID NO: 824 - DNA, 444 bp, Arabidopsis thaliana
cagcagcatacctgcggtgcttgctctagacccttgtcggagaaatccttgtggagcagccaaaagatctttatgaccaacgagctctctgtatctgcaattctagcttgtgggcatgtctatcatggggagtgtttagagcagatgacgccggaaattgataaattcgacccttcatgcccaatatgtacaatgggtgagaagaaaacagcgaagctgtcagagaaagcgttgaaagtagagatggatttgaaagcgagacacaacaaaagactcagaaaccgagttttggacagtgactttgattgcgatgattttgtaatgtttgaccacagccacaggacagcagcagcagcaagcaagagccctagactcgtctcaagttcgagtgctaaaagctattcagcaaagcctttcttggctcgacacttctctttcgggtcc

SEQ ID NO: 825 - DNA, 444 bp, Arabidopsis thaliana
tggcgtcgacgaagcccgattccgcaatcaaccttgaagaagaggctgaaggcgacggtgtagccgtagacgatccgattttcataccggagaccacgaacttactcgtccgttactcgccattcgacgacagggacatcgattgcaatccttatttccctttcacaggcccgatttcagattctggatcaggttcttactcggattctgagcccgatcccaacagctgtcccatcgatttcttcgatcgagattcttccgatgttgacgtggctgagtacttggaatcaggagggctgaccgccggtgattataatatttggggcttttatgaccccaaggaagacgaggaagaggaggagatagttttggggacttccgggtcggatctgcaaccgggtgattcaggggagcaagggcttcgagtgaccggtatcgattcag

SEQ ID NO: 826 - DNA, 444 bp, Arabidopsis thaliana
attatcatttgaagtggacaaggagacgaagaagcggtttaaccgaagtaggagttagcggtttagcgcagagacttcgtagtcataagcttactcaagtgtctttgtttcagaagcctttggttaaagttaaacttggggatttgatggctgcaactaataacttcaactcagagaacattattgtttccactaggactgggactacctataaggcgcttcttccggatggttcagcgcttgcggtgaagcatttgagtacgtgtaagctcggggaaagggagtttcggtatgagatgaatcagctatgggagcttcgtcatcctaacttagcaccgcttcttggtttctgcgttgtggaagaagagaagtttcttgtttacaagtatatgtctaatgggacacttcactcgttgttggattcaaataggggtgaattagatt

SEQ ID NO: 827 - DNA, 444 bp, Arabidopsis thaliana
ggagtcttaccaaaaccagtccggagcgcagcagactcaccaacagcttgaccaatttggaaatccatttccagccaccaccggagcctatggaactgccggtggagctccagccgtggctgaaggtggtggtttaagtggcatgcttcaccgttctgggagtagctctagctctagctcggaggatgatggactaggtggaaggaggaagaagaagggaataacggagaagattaaagagaagctgccgggtcatcacgactccaacaagacttcttctttaggttctacaacgacggcctatgataccggcaccgttcaccacgagaagaaaggcatgatggagaagatcaaagagaagcttccgggtggtcatcattagtttcattttaattaacttgtttggtgtgggtcgttacgcttatggtcgttgcatggaataaa

SEQ ID NO: 828 - DNA, 444 bp, Arabidopsis thaliana
  misc_feature (1)...(444): n = A,T,C or G
cctggtcaactcaactctgacctccgtaagcttgctgtgaatctcatcccattccctcgtcttcacttcttcatggttggttttgctcctctcacctcaagaggttcacagcagtaccgctccctcacagtccctgagctcacccagcaaatgtgggactccaagaacatgatgtgtgctgcagacccaaggcacggacgctacctcacagcctctgccatgttccgtggcaagatgagcacaaaggaagttgacgagcagatgctgaatgttcagaacaagaactcgtcctactttgtggagtggatccccaacaacgtgaaatcaacagtctgtgatatcccacctactggtctgaagatggnatcaactttcattggaaactcaacatcgatccaagagatgttcaggcgagtgagtgagcagttcacagctatgttcagg

SEQ ID NO: 829 - DNA, 444 bp, Arabidopsis thaliana
  misc_feature (1)...(444): n = A,T,C or G
aaagcaagagctcgagatcgtcttgggtaatgagcatatctcattcgctacatctaagattggatctcttgttgattgccagagcagtaatgatcctgaaggacttcgcatcttctactatcttgttcaggacttgaaatgtcttgttttttcgctcatctctctgcacttcaaaatcaagcctatctagagaagaaaatcagtttgtgacatgtcaagacgcgatgaatttgttgggaacatgaggactttgtgactgaagtttggttgtttttatgtctctggttctctgtttttttttttttgttggatttgggtgaaagtgggtatgtaagatgttctacctcaacttttggtnnntttttgtgtcaacatcccatgtgaagaacctttcatgaaccacaacctatcttctaaaaaaaaaaaaaaaaaaaaaaaaaaaag

SEQ ID NO: 830 - DNA, 444 bp, Arabidopsis thaliana
  misc_feature (1)...(444): n = A,T,C or G
ccacgcgtccgtattcctcttcaaaggcaaacaatttacacagctatatatatatttttagggtttttgagtatctcgcgaggttttacatagatttctccattatggattcgatgatgaatcagaagactgttttggctgtgacggatgatgtggtgttacctgttagctctgttttagctataatgaaagagcttggaaaggaagtgattgagagttttgatcctctgattattactcaagcatccacnntaaatcagtttcctttggatgtttcctctgtggaggcggtattagccatttccaaaacatctgatttcccaagtgataaaatatgtggtgagttctcaagaatcttgaagcctnncggcacggtttctgtgtgcaaagttttggagggtgaaacgggagaaattcaacagaccattcaaaggagagtgacat

SEQ ID NO: 831 - DNA, 444 bp, Arabidopsis thaliana
ctttttttttttttttttggagaaaacaatcagagctcaaatatgtgtcaatgacttaaaaactgttattttactaaaaataactcagagctaatcacaacctgaataaactgaactctaccaaatcaagtcctcttctgttccaaagccagtagcttggaagttagaacctttaaagcattataaacatctcacaatttctacaggtttccatctgagccagctgcacaaaagaacccggaattctcatcaacgttttgaactctgatttcttgataatggcgtgtcatggatttctggggaaaccgacgccgaaatcatttgggcgtcatcataaacatgcaaggaaaaaccggaatcatcaatccagatgtttggctgcagccgttgcagcagctggctccatcttcacatccctcaacatgtctatcttcacattccaca

SEQ ID NO: 832 - DNA, 444 bp, Arabidopsis thaliana
  misc_feature (1)...(444): n = A,T,C or G
acaaaagctgattagaaatcccaaatacatattcttgaaaggctcattacattgcaaaacacaagctacattagatagataagcaaagaaactactaaagaacaaattctggaccgtggaatctttctgtgtgtctctaactcttgctcttgaaaggaatcgctctgatgacaatctggtgatatagtgctgctagagctgctccaatgaatggtccaacccagaaaatccaatggtcatcccaagagtggtccttgttgtagataattgcggctccaagacttctagctgggttgattccggtcccggtgatcggtattgttgccaagtgtaccaagaacactgcaaatccgattgggagcggcgccaaaatcgggacgtgtgagtnncgggcgcttctcttggcgtcggtggcggagaagacagtgtagacgagaacgaatg

SEQ ID NO: 833 - DNA, 444 bp, Arabidopsis thaliana
ccacgcgtccgcgtgtatcgagaaatcatcacgtgaagaacacgtgggtgaaagaacgttacgagagcgatgaagaagatggagaggtgaacaaactcatcctaaaggaagatgaagaaactaaagatatggtgacatcaccgagtggtgagaggatgatgttaacaagtaaggtgaggtatctcacctatggagctctcaaacatgacacggcggcttcggcagcttccggtggtggaggaagagccttgcctcatccgtcgaacaagtacaaccgtggccaccccaagtactacagatgcagaggttgaagtgaaaactctctgctgataaaataatttcgaattaattaattgtaataaccctatattgtataataagtttgttgagtatgtatactccaaaaaaaaaaaaaaaaaaaaaaaaaaaaaaaaaaaaaaaaaa

SEQ ID NO: 834 - DNA, 444 bp, Arabidopsis thaliana
ttttttttttttcaccaagaaaaataaacattactatatacaatggtgaatctgaaagaagataaatccaagttgattatctatattacaacgagaagatagaaaccagagttttcttcccaagaaaattttacagcttcttcttcttctaatcttccctcttagttatatatgaaacagtaataaagatccgcccgacccagaaaaacaccaaacgaatacatagattcgacacttcttttaaatactgcatctttatatacaaacactaacctgaataaaacagttaaacggtgaccggcgacggtaactgatcttcatcttcctccttcctcttccctctctctctctcttaggagaagatgaaaaacaaaaacatattcatttactttcaaaaatggtagtagtaatagtttgcagcagtagtaatcaaatcctcctctg

SEQ ID NO: 835 - DNA, 444 bp, Arabidopsis thaliana
aaaacatatttttatgttacaaaatctacgcaacgcaatggtaaacaaggagtgataagttcacaagaaagtcactccaaatttttgtatacaaaagtgtagattacaagataatctagcagaagtcagatttggtgataaaagtacgagtctcccggtttcttatccccaccatcgctagttgctcctccaaatcccatggtatgggtcactccagaaacaagattagtaaccatggaggttccccaatagacccacccgttttcatctccatgtcgctcagcctcaacgccaatcctctgttgttgctctgccatgatatcaccccatctctttctcataaactctctaacaacttcagctccttgagtagccacttcttgagatgggatctcaagcgggttctggtccaagttcagtttctctagcttcctcagcctataa

SEQ ID NO: 836 - DNA, 444 bp, Arabidopsis thaliana
tctagagcggccgccctttttttttttttttttttttttttttttttacaaaaatatcgacttctatatttacttatgggtctctttctagtttctacaactaacgtttcgatcaaacgcaaccgttacaaggtcagtgttcagtcagttttactcctgcgttaatataaacaaaccatgtcttaaaatcattgatgattaaagatatgttacaaatacagtaagttagttttgtttccgttacctctaattagtccgctctgagcaacttccccgacatgagaccgagacagcgatctgagattcatcagagacgctggagtcagcggaagaggcggtggagaggctactctgttttggttcctctcgggcaagggttgttgggccattgctctctggtttctagaaggtatcgagtagcttctcggtacaacaagcggtgga

SEQ ID NO: 837 - DNA, 444 bp, Arabidopsis thaliana
tttttttttttttttttttatccgaagcttcttttgcttggtgtcaaatttaagtgtgggaaacaaagttggcaaactggtgaagcaatggctttacacttgaaatgaaaatacaaaaaaaaaaaaccagaaatatttttggtagcaagttaaaaagatttgtgtagccttgccttctgatttattgaaccaatcatctccttgggaagcaagattctatggaagtgttactttgagttcttttctgtctgctccaaacgactcaactccgcagtctttcacgtacatgtttgtgaatagctcagatgcatctggtatcgggctctccttggcctgagctacggcgtcatctacttctttccttatctctttctccatgtccttaagctctttttcggtagctatgtcatgagttaagagcaactttcgcaccctttcaattgg

SEQ ID NO: 838 - DNA, 444 bp, Arabidopsis thaliana
tcctcaccttgatcgatagcattcgaccgacgatcaaggagattcaatacagcggcgtggagcttcctgctcaccgccaagctcaaatcggtatgctcttcgatactttagagaaaggcaagaagctcactgacaaagtccttagctctaagcgatggaatttatatcgacagctaaccctagccagaaaaatggagaagctagagaagaccatctctaatttccttaaaaatgaggtctttacacatatcctcgctgacgttcatcatctccgggccgataccagtgtgcgtttggatcgggttgacatgagcctcgacagggtgattcagcaagtgggttccatgaaaattgggggaggtggcttgatatcagaggccatgaagagagccgaggctatggagattgagaccaacgacgattcggagaaatttggggttggat

SEQ ID NO: 839 - DNA, 444 bp, Arabidopsis thaliana
tctcagcttggttcatctttaaaccggaaccaaatcacagaacatcatggctcctccctctgccgtctcgcctcccgctcgttcagctgagcttgccacctctaacaaggctcccgtcaacctttccaagaccgccatgaacacgacggtcgaggagatgattggccaatgggacagcttcaagtttgctcccatccgcgagagtcaagtttcgcgagccatgactcgtcgctacttcgaggacctggatcgctatgccgagtccgacattgtcatcatcggtgccggttcctgcggcctgagcgctgcttacgtcctcggcaagaagcgtcccgatctcaagatcgccatcatcgaggcctctgtctctcccggtggcggtgcctggttgggaggacagctcttctcggccatggtcatgcgcaagccggccgatgccttcct

SEQ ID NO: 840 - DNA, 444 bp, Arabidopsis thaliana
  misc_feature (1)...(444): n = A,T,C or G
cttcactgatcgtggttggggtgccactctcgctgacctctactctcgcacggctgatatcattcttcgtggatatgctggttggaattctaggtttgccttgaaggttcttcaccaagtattcccaaaggatgctgtgatacaaccttctttggtgatagtctatttcggtgggaatgattcaactcatcctcatccttcaggtcatggccctcatgttcctttatctgaattcatcgaaaacatgaggaagattggtgaacatcttttgagcctttctgataaaactcgtgtcattttcctcactccgccaccaatgaatgagaaacagatcgagatagtttttggagatgcaataaaaggccggagtaacgagtnnnnccgtccatatgcagaagagttgttaaatctatgcagagagatcaatgtgaaaggtatcgatat

SEQ ID NO: 841 - DNA, 444 bp, Arabidopsis thaliana
taccatcagaagatcaacagcttggtttacccgtggggaagcacgttttcgtttgcgccaacataaacgacaaactctgtctcagagcttatactcccaccagcgccatcgacgcggttggtcatatcgacctcgtcgtcaaagtttacttcaaagacgttcatccaaggtttcccaatggtggactcatgtctcaacacttagactcgttaccaatcgggtcaatgatagatatcaaaggtccactagggcacatcgagtacaaaggcaaaggcaacttcctggtcagcggcaaacctaagtttgccaagaaactagcaatgctcgccggaggaacaggcatcactcctatctaccagatcattcaatctatattgagtgatccagaggacgaaaccgagatgtatgtggtttacgcaaacagaaccgaggatgacattcttg

SEQ ID NO: 842 - DNA, 443 bp, Arabidopsis thaliana
cttttttttttttttttttttttaatccaactttgtttctctttctgcaaattgttcctcgaagaaatgacttcataatgcaaccatacattattgagcaaggatgataaatctcctgcttgctcggaagaaaagttaaaaccaaaataatatctctcttgaccttccagagaatcaatcctgtcttgaaatgatttcaacacacaaaaacaacctgagattggaattagaagtactgagtagacggaaccttggcgacgggtttaccacctggtaagacattgtcgggaagaatcaactccggtggagtttcacgggtaatcccaagcattgaatcgtaatcctcgtccttgcgtgcatacttcttcctaagcgctctctcaacctcgatctgctcaaatgactttgaattctctgaggcgtgaatctgtgcgagattgatg

SEQ ID NO: 843 - DNA, 443 bp, Arabidopsis thaliana
ttttttttttttttttttttttttttttttggtacaaaagaatttttcaatataactgttctagtgtaagagcaaagcaaaataaaacgttagaacgccggcaaaatatcatctgaagtaaagagaagacaaatgatgagtcagtttctgctgttctctgtgagatctgacagagaattctctgtgctcattctggttcttcaccagtttctagtggctagtcgctagtgtgtaactccggatctttatattagttcatcgataattagccttcacgccacctcaacttctccttcgggaagacggacagccaagtttgcctgctcatccgcatcagcatttaaattccttagtacatgactgatctcaaaagagacacatttgttgcaaagtagttttgcttccttgtggagctttgcgagtacctcatggcggacgcgtgg

SEQ ID NO: 844 - DNA, 443 bp, Arabidopsis thaliana
ttttttttttttgcatgaagaatatatttttaaatttgcatatatagcagaacatgaatgaatataaaacatcaaacttttgatatgtgtatttagtatagataagacttggtcaaatcagaggaacattcttaagtaatcatccatgcgtttgtacttgacgtcaggataaagactagaagcttcttcgtcttctccgacttcgtgatcagtgagacatccttcatagaaaatgtgatagaaatgtcctatccctgcttggtgtggaatctccatttctacatacatgtaaaagaaatcaaataaagttgatgggctatatttttcaaatagacctaaagcctggcccattaaggatatgttgccgaacataaagtagattacgttacactattgcttggacttacgttcaatgttggcgaggaagtcttgtgcagcaatat

SEQ ID NO: 845 - DNA, 443 bp, Arabidopsis thaliana
ctttttttttttttttttttaaaagtataattcaaacatttattattattattataggaattgaaagaaaattaaattttcaaaaagaccgcttacttgtttattatatacacagagaagagaacagtctcactcgccactttcctcgagaaaacgaaaaaaaaagatggtaggaagaagaaaagctttactcttttctctctgtttcttcttcctctctcttccttccttctcttcccttccatccttccaaaccctattccccaattctcattcccttccttgtgcttctcccgtctccttccaacccgactccgactccgagtcactgctagaatccgaatttgaatccggatccgactccgagtcttcttcttccattactctaaacctcgaccacatcgatgctctctcctccaacaaaacacctcaagagctattca

SEQ ID NO: 846 - DNA, 443 bp, Arabidopsis thaliana
cttttttttttttttttttttttttttaactacaaacataaatagttttggcattacatcacaacacatagcaaatagattaatatgaaattatagattatatagtttcttaaacttaccaagattcaaggcaatgcattataatgattaagatcagtccaagcttgaattccattgttccattcacttcctcctcctcctgtattagcattattactaatcactccttcattatcactgttattaccaaaataccactctgtctgattatctcctttcttcgtcggcgacgacggcgatgatgagtttacgatctcaagattccgataaagaataggttgtggcctctcgacgacaacagtttcttccttagaattaccaaaaagcatcgccatcctctgttgctgaagcctccagtgtaaatcttggtttaaacaactcaa

SEQ ID NO: 847 - DNA, 443 bp, Arabidopsis thaliana
ctcgggggaaaataataatacgacttttgaaatctctcactaatatttcccaagaaaacctgatgaattaaaagttcatattttcttggtgttgattggtattagatgactatttcttagtattagtcaattctctgtttccatcttatatggatagtctagacacagagcaaagatccttctttggagaaaaagaagatgagagacgagagaggatcgtttcttcacgtattggtcgtagatagatcttaatcgataaccatctaggccttgatctaaccattcaatataaactttatttccttcttcttttcgatctcaattgttccgaccaaacaagatgaagagatcacgtggaagctccgattctttatccggtttcttaccaattcgccattctacaacagacaaacaaataagcccaagaccaacaactaccggct

SEQ ID NO: 848 - DNA, 443 bp, Arabidopsis thaliana
tttttttagaccaagtcctatttaaattaaaaaccaggaccatttctggtagattcaaagtatatcacagtattgaagcaggacaggtaccaaacaaaacaaaaaaaagtagatagatgaaacaacaacttaaaagagagatgttccctttcccttcttgtctccaccgatctcaaagtgcttgcacctcttaatcgggcgttgcgagaaatgcttgcagctttggcattgaagcctcagcacaatcttcttagttgtcttagccttcttgtggaagacgggcttggtctgacctccataaccagattgtttacgatcataacgacgctttccttgggcagcaaggctatctttacctttcttatactgcgtcaccttgtgcaaggtatgcttcttgcactccttgttcttgcagtaagtgttcttagttttcggaatgttca

SEQ ID NO: 849 - DNA, 443 bp, Arabidopsis thaliana
  misc_feature (1)...(443): n = A,T,C or G
agtttatggtttgattcaagagaaaggtgtgttttgggcttttgatcagatgattgaaactggagatttgccttatgaggagatcataaagcttcagaattcgaaaaggagaagcttcaaagctatcgagttagggagtgaagaaactgctagagttttaggtcaagtgattgatactttgggtttagctcctgtgcatttggttcttcatgattcagctttagggttagcttcgaattgggtttctgagaattggcaaagtgttcgaagtgtaactcttattgactctagtattagtccagctttgccgttgtgggttttgaatgtaccggggattcgagagattttgttagcgttttcgtttggttttgagaagctagtgagcttnnggtgctcaaaggagatgactttatcggatattgatgctcataggatacttttga

SEQ ID NO: 850 - DNA, 443 bp, Arabidopsis thaliana
tcgagcggccgcccgggcaggtagcttcttgtgttgtgacgcatactcgtcgcagtcttgagatatggccgccgcagtttccaccgtcggtgccatcaacagagctccgttgagcttgaacgggtcaggatcaggagctgtatcagccccagcttcaaccttcttgggaaagaaagttgtaactgtgtcgagattcgcacagagcaacaagaagagcaacggatcattcaaggtgttggctgtgaaagaagacaaacaaaccgatggagacagatggagaggtcttgcctacgacacttctgatgatcaacaagacatcaccagaggcaagggtatggttgactctgtcttccaagctcctatgggaaccggaactcaccacgctgtccttagctcatacgaatacgttagccaaggccttaggcagtacctcggccgcgacc

SEQ ID NO: 851 - DNA, 443 bp, Arabidopsis thaliana
tccaagagttaaagaccttacaatgggtataaaaatgcttacaccaagaaatttagcacccaagtctatatgcaaaacagtatactcaaccgaacttggtgacgcacctaataattggacactgaaacaatgttgtttactcaaggtgaattgatgaaacgcctgaagtaatacatgtggttcgtggatcaccactttctaggcaaacgccatgtggatcttctctcaccaacaaggccaaaacattgtgcgaactccatgcctgggtcagtttggtgccggaatcccctaaagtgattgcaaatatggcatcaaatccaccagctccaggaacaccagcaagtagaactccttcagcactcattgtagaatccaaaagttgagtttgagattcaggctctatcggaacgctagccgcctcacccatctgacgcataagaatt

SEQ ID NO: 852 - DNA, 443 bp, Arabidopsis thaliana
ctttttttttttttttttttatgaagacaatgttttattggatctcatgtgtttttataccgaagttccaatgatttaaggcagagatcataagacgagaaagagaagaagaagtcttaatctgtagagagatgatgttactcagatgatccagctgctatcatccttcaccattgtttctttcgaccaggtttgttgtacatgttcccacaccaatccctccccttcctttgaggtgaatttgacagttgttgtgcagcatcttcgttcgtccccatcttgctcccatttatcaagctttactatccatgtcccaggagtagtgtctgttgccaggacttgatctgcccaaacgcgaaacttcttcccttgtttgtctccatggtacttgcgcagctcatcgatggtatctcaatgaaatccttcttccctcggacgcgtgg

SEQ ID NO: 853 - DNA, 443 bp, Arabidopsis thaliana
tttttagtaaaaaagattttctggaccataaaacgaacatgatatactgtatcaagaaccaaaaaacaatgacacaaaaattaacaagtgttggccattgattcgatgagcaacgcatagccctctgggacaggcgactgcagacgcacacactcggctaaagcagggacgtccgatgacacgtccagaaactgagccacaaagagaagcagatgaaaatctgacatcttcttcaccaacggcaagctctttgcccggtccagatgtgtttttagagcccgcatcgttgctcgactgctccggttctctattgggaatattgatgacagaggcccctggtgatccaagatcctgacgagaacgaggaagaaatcgttatctacctccttaagatccttcacaccaacaaccacctccttcttcatcttagagagctttggatc

SEQ ID NO: 854 - DNA, 443 bp, Arabidopsis thaliana
cctttttttttttttttttttttctcaaatacaattctctcagtcttaacatatagttgttcatcagacaagaaaatcttatgagaaaaacaagtatgcatagtacgatttcgaataagtaactcatgatacaaagtattgttttggtgaaaaataaagaaagaaatgatcaaagttgttcagtcatagactttgcattcctcatcagccgggtttgtcttgcagaaatcctccaaaggatctccacttccaacagcttccgctcccggccacttgctagccactaggtgagccaaatccaccactctttggctgtaaccccactcgttatcataccaagcaaccaccttgaccatatcatcacccataaccatagtgagggacgagtcaatggtggtagagacatcagagcacctgaagtcaacagagacaagaggcgcatc

SEQ ID NO: 855 - DNA, 443 bp, Arabidopsis thaliana
ttttttttggagatacggatttaaagcatagttcaaaagagctacaacaatctacatacaaagagcttttcgtggattgatacattgaaacctaaagataagaaaagccttctatgatgatttgcagagatggatttaactcggtgggttaaagtttacccttcacatgccggtttggtgtcaaagctgctaatgcatatagcaaaggcttgaaaagcagatagagggtagcgataatccatggtgaaaatatccttaccgattttgccaaactgtaagatcaccctctcatgttcttcaggcggtgcatccaaagaagcgtcaatctctgcaacaagctggaagttcttaactgaagccacagtcactcttcccttgaagttgaggcaccagcactgcaactgctcatgccatcttggggatttgtttttgagaactagcgg

SEQ ID NO: 856 - DNA, 443 bp, Arabidopsis thaliana
cggccgcgatactacgtctgttactagctcggtctatgatttgccagagaacattctaatgacggatcaagaaatccgttcgagccctccagaggaaagagagttggatgtaaagtactctacctctcaagttagtagtcttaaggaagactctgatgtaaaggaacagtctgtattgcagtcaacagtggttaatgaggtcagtgataaggatctgattgttgaaacaaagatggcgaaaattgaaccaatgagtcctgtggagaagattgttagcatggagaataacagcaagtttattgaaaaggatgttgaaggggtttcatgggaaacagaagaagctaccaaagctgctcctacaagcaactttactgtcggatctgatggtcctccttcattccgcagcttaagtggggaagggggaagtgggactggaagccttt

SEQ ID NO: 857 - DNA, 443 bp, Arabidopsis thaliana
  misc_feature (1)...(443): n = A,T,C or G
ttacttttgttcatatctttttacttttcaaactactaattttcctttcgcttcttctattaataacaacactctctctctcagacttcttttctttttttctacggcgttgattcattcgcaatgacctcagtttctgtgtaccataattgacctagcagattctgtttttaatggtagattctgacccggtggaatttccgccggagaaccgccgtggacagctcttcggcaaatacgaggtcggaaaattgnnnggatgcggcgccttcgcgaaagtgtaccacgggaggagcacagcgacgggtcagagcgttgcgatcaaagtggtgagcaagcaacggctgcagaaaggaggactcaatggcaacattcagagagagatcgctatcatgcaccgtctgcgccacccttctatcgtgcgcctgttcgaggtcctcgcc

SEQ ID NO: 858 - DNA, 443 bp, Arabidopsis thaliana
cacaattcttctgtgtcattcatatgatctcagaaagcaaaaactattcccttcgtgtctcaaaaaagtccttttgaatcttattatctctacttttcttcaggattcacttgctgtctggaccggcgtgcacaatcctggaaactcttaacgaaaccgctacatttcaacggactaccgatgttctccttgtagcatttcatccaggcttcgtgatctgacgaacaaggcattggtttaggttccgggatcttaaactctttctccctcagatccttggctctctccgtaacttcacgaacaatgttcttctcttgtaactccagcttctcaagaaccttctcactctctttcacaacggattttatcgattccagctctgtgcttgctgctccttgtggtggtattgggaagaaaaacggtggctgcatcggtaattcagc

SEQ ID NO: 859 - DNA, 443 bp, Arabidopsis thaliana
cttctaactccttcttcttcatcttcttcccatatccaaactccatcaacaactttcgaccacgaagacttcctcgatcaaatcttttcctcggccccgtggccctccgtcgtcgatgatgctcatcctcttccctccgatggcttccacggccacgatgtcgactcaaggaatcagccgatcatgatgatgcctttgaatgatggctcctccgtccacgctctttataatggcttctccgtcgccggatctcttcctaactttcatatccctcagggatcgggaggaggattgatgaaccaacaaggacaaacgcaaacgcaaacgcaacctcaggcgagcgcgtctacagctactggcggtacggtggcggctccgccgcagagtaggactaaaatccgagctaggagaggtcaagcaactgatcctcatagtatcgccga

SEQ ID NO: 860 - DNA, 443 bp, Arabidopsis thaliana
gtttactgaggaagctattttcagaacgagaggatccaaacaggacttcgggtttgctgatggcttccaaaatatgcggtgagaggtctggtcttgctgaggaagggttagattatgcccggaaagctatcggaaacttggggaaggaatgcagtcaattagatggagcagcgcgtttcgttttagggatcacgctcacggaaagctctagaatggctgttacagagactgagaggatagctaggcaatccgaggggattcaggccctggaatctgcagatatgacaaacccgagggttgtgcaccgtcttgcgttggagaatgcagaacagaggaaactggattctgcattagcatatgctaaagaggcgttgaaacttggagcagagtctgatcttgaagtatggttacttttggctcgggttttatctgcacagaagcgg

SEQ ID NO: 861 - DNA, 443 bp, Arabidopsis thaliana
aaacgaagcacactacacagagattctggatgaagaacaaatccacatgaaattcgattctcacatttcttctatttaattcgaatttcaaattgccatttctcagattccggggaaagaaaaaaaaacctagaaaagtgttttctccgttttccaatcatccatgagtccggacaataaactgcttccgaagcggatcatccttgtacggcacggtgaatcggaagggaatctcgacacggcggcgtatacaacgacgccggatcataagatccagttaacggattccggtttgcttcaggcgcaggaagccggagctcgtctccacgctttgatctcttctaatccttcttcaccggagtggcgtgtgtacttctacgtttcgccgtacgatcggactcgatctacgctccgggagatcggacggtcgttctcgcgtcgcc

SEQ ID NO: 862 - DNA, 443 bp, Arabidopsis thaliana
  misc_feature (1)...(443): n = A,T,C or G
tgtgtggccatatattctgctatcagtgtgtatcagattatatcacaggggatgaggacacgtgccctgcgcctagatgcagagaacagcttgcgcatgatgttgttttctctaaatccacgcttagaagttgcgttgctgatgatttgggttgtagttcctcagaggataatagtcatgataaatcagtttttcagaannnnnagtttagttcatcaaagatcaaagctgtcttagatattctgcagtcgctttctaaccaaggcacttcaaactcaacacagaatggtcaaatggcttcttcctcgcagcagccgaatgatgatgatgatgatgatgatgatgatgtcaccattgtcgagaaaacgagtctgaagtcaactccttctaatggaggaccaataaaaacgattatattttctcagtggactggtatgcttgac

SEQ ID NO: 863 - DNA, 442 bp, Arabidopsis thaliana
  misc_feature (1)...(442): n = A,T,C or G
acgcgtccgctttttcagatttgaccctttgttttcaaaagaaacgatttttagtagccgccggggaatcaggagaatggtgtctccggagaatacgaactggcttagtgattaccctttgattgaaggtgctttctctgatcagaaccccactttcccttggcagatagatggctcagctactgtcagtgttgaagtggatggcttcctttgtgatgcagatgtgatcaaagaaccaagttcaaggaagaggatcaaaactgaatcttgcactggttctaactcgaaagcttgtnnngagaaacaaagacgtgatagnctaaatgacaagtttacggagttgagttccgtattggaacctgggagaactccaaaaacagacaaggttgctattatcaatgatgcaattcgcatggtgaatcaagcaagagatgaagcgcag

SEQ ID NO: 864 - DNA, 442 bp, Arabidopsis thaliana
ggttgcaggtgtgttagatgcgatgccttcaagtaatttgaaacctgagaacgaagaagaagagcttgatgaaaagaagatttatagaactacatatatgtttagtgctacaatgcctcctggggtagagcggctagctcggaagtacttgaggaacccggttgttgtcaccattggtactgctggaaagactacggatttgatttcgcaacatgttattatgatgaaagaatcagagaaattcttcagattgcagaaactgctcgatgagctcggcgagaagactgccattgtgtttgttaacacaaagaaaaattgtgactcgattgctaagaatctggataaggcagggtaccgtgtcacgaccttgcacggtgggaaatcacaagagcagagagaaatcagcttagaaggattcagagcaaagagatacaacgttctt

SEQ ID NO: 865 - DNA, 442 bp, Arabidopsis thaliana
caagttgttggaagacgaagaatctcatatcacaaccattgttgcaggcacatttgggtacctagctccagaatatatgcaaagtggtagagcaactgagaaaaccgatgtatacagttttggggttttggttcttgaagtcttgagtggaaaaagaccaaccgatgcttccttcatcgagaaaggccttaacgttgttggttggctaaagttcttaatcagcgaaaaacggccaagggatattgttgatccaaactgtgaaggaatgcagatggagagccttgacgctctactatcaatagcaacacagtgtgtgtctccgagtccagaagagcgtccaacgatgcatcgggttgtccagttacttgaatcagaggtcatgactccttgtcccagcgaattttatgattccagctctgattaattgcataaacccaccagt

SEQ ID NO: 866 - DNA, 442 bp, Arabidopsis thaliana
  misc_feature (1)...(442): n = A,T,C or G
agtcacagttccggccaccaggcaaagaagagagaaaacgaccctgactccaataatggctcctagttctaggtctccttcaccacgtacgaagagactgagaagagctcgaggagagaaggaaattgggagaagtagagagagagaagatgatggtagagaaagggagaagagaaacagtagggaaagggatagagatataggaagagatagggatagggagagaaaaggagaaggagaaagagatagggaagttggggataagagaagacgatcagggagagaggatactgaaaaaaggagaaggacaagaacagatgatgagagatactctnnnggaagacatgagaggtctacttcaccgtcagataggagtcacaggagtagtaggcgttcacctgaaagagctattgcctcaaggcatgatgaggggtctaatgca

SEQ ID NO: 867 - DNA, 442 bp, Arabidopsis thaliana
gatccgaagacgaaacgatgcctataagtgcgacaatggtcggagctttgctgggtctcggtacccagatgtactccaacgccctccgcaagctcccttatatgcgtcatccgtgggagcatgtggtgggtatgggacttggtgctgtgtttgcgaaccagctcgtgaaatgggatgtgaagcttaaggaagatcttgatgtgatgctcgctaaggctagagctgctaatgagcgccgttactttgatgaagatcgggattaattttgcgtgatctttgaagtcttcagaaaagaaatatcttcccctgaactcatctcaagtgcttgttttgtctgatctttcctgtataagcgtttcttctccttctctttgacttcagctctggagttcttttcattcactgttttcgaatatgaacctaaagatttgtgttttcacaa

SEQ ID NO: 868 - DNA, 442 bp, Arabidopsis thaliana
agtggtccgagaccgaatccgcaaggctcgtatcattacggtttgatcaaaccaggccgtacgatcatactcgccaactcagctccttggatcaacggcaagcaaaggtacgccgtgaacggtgcctcgtttgttgcgcctgacacaccattgaagctcgccgattacttcaagattcccggagtttttaacctcggaagcatcccaacgagtccctctggtggaaacggagggtatcttcaaagctctgttatggccgctaactttagagaattcatcgaggttgttttccaaaactgggaaaattcagtccagtcttggcacgtctccggttactctttcttcgtcgtcggtatggatggaggacaatggactcccggaagccgagcaaagtacaacctgcgggacgcggtttcacggtccaccgttcaagtatatccga

SEQ ID NO: 869 - DNA, 442 bp, Arabidopsis thaliana
ttccaatgcttttcagatactttgatcgtgtgatatactaattacaacccaattatctgagttcacaaataaagataagagtctgaaaaagacagacaaacaaacaaaaaaatgcaccaggaacaagagaattatgatcatttacgtacaaataaacggagaagaaattattaaataaacaaagttggtctcttattatcttcgtctgggtcgggcattaatgggagaaccagatgattgtgagcctctgtagtttctgcttggagaatccattgatcctctaaaggaagagtaggtagctttgggtaatggaggcgttgactctaatggggctgactctgcaaagcatgctgtgttcacacgagttctctccaactcttgttgtagcaattcgtttgaacactgtttcgttagagcgaggaggtcatctgctgaaacagat

SEQ ID NO: 870 - DNA, 442 bp, Arabidopsis thaliana
atctcgagaatctcactaatctccagccttccggtggctgcgacgattccaacttcccttacctcttcaagttgaaatgtgaaagatgtggagaggtgactccgaaagaaacatgtgtgactttgaatgagacttttactcctccgggaggtaggggtacttgtcatcttgttcagaagtgtaagttctgtggaagggaagggaatgtgactatgattccgggcaaaggtcgacctttaactctggaagattctgaggctggagaacatgcccctcttatggtgtttgactgtcgtggctatgaacccattgatttcggatttggtggatattggaaagctcaagctgaatctggaaccaaatttgatgagattgatttgtcgagcggggaggaattcacagagtacgatgagaagggagaatgcccagtaatgatatcgaa

SEQ ID NO: 871 - DNA, 442 bp, Arabidopsis thaliana
  misc_feature (1)...(442): n = A,T,C or G
atggaatcttttttgttcacatctgaatccgtcaacgagggacatcccgacaagctttgtgatcagatctccgacgctatcctcgatgcttgccttgaacaagaccctgagagcaaagttgcttgtgagacttgtaccaagactaacatggtcatggtttttggagaaatcaccaccaaggctaacgttgattacgagcagattgttcgtaaaacatgccgtgagattggattcgtatctgctgacgttggtctagatgctgacaattgcaaggttctggttaacattgagcaacagagtcctgacattgcacaaggtgttcatggtcatctcaccaagaagccagaggaggttggagctggtgaccannntcacatgtttgggtatgctactgatgagactcctgagctcatgcctcttactcacgttctcgctactaagc

SEQ ID NO: 872 - DNA, 442 bp, Arabidopsis thaliana
tttttttttttttttttttttttttttttttttttttttttttttttttttttttttttttttaagaaactgaactttgttttatatgctaacaactctttcattacattaacggaagaataacaaaatagaaaatgtatgcacaacaattaaattaccaaaacccattttttcacttaacaacaaaagggaacaaagaggagtatgatacgatctaaaagggtcttggaaacaatttgacttgacgaagacgcaaagataatgatgcacaagtggaagatgagcgacattgaagaagaggaagtgatgtggatcgttgttagagatgttttgtttctgatttccacgccacgatccttatttggttcacttcttcttctctttgactttgacccttcctttatttcattttttaaaagaaaacttgaataatggggaaatt

SEQ ID NO: 873 - DNA, 442 bp, Arabidopsis thaliana
  misc_feature (1)...(442): n = A,T,C or G
tttttttttttttttttttttttttttttttttttttttttttttttttttttttttttggcacaataaagttctctctccaccatgtttcaacttataagaaacaatcactctgtttttaacaagcaacaacaattgtactctgtttcaacaagcaacaaaactctatatacgacatatactctctcaaaggttagaagactcaaaacgctattctaaccaaaacactgcaaagcgaatcgctccattgcgttttacaaaacgcaagcggttccagaacaaagcaagaattagactatatatnnngaaacaagcaaacatcatggtgtcatccaaccnnngtttagccacgatgagtcattgacatattgcagaagtagttgaagtcatgatgttggaccctgagctgtttaagccaagaatccgcaacactgtaaagcga

SEQ ID NO: 874 - DNA, 442 bp, Arabidopsis thaliana
cttggggatcaaaagtgatcaagtgcaaagaggagaaacatttcctcgggtgtccaacttcacattggagcaagaagctttggatacatcttgttgagtttgatcgaccagtttaacgttttgcattgatattcctcgacatggaatgttcttgctgcatacaaatttcacagctatgggtcttgagctcgtcccttgtatgtttttgtacaacacattgctcacttgtaccgcggatttctgttcggggcatgcttcaacacgatcgcagtagtcctggttgatgattattgggtttgtaacgtttttcattatgatgtcttggaatatgatgttctttgccattccatgtcctccctgccaagtcttgattctcacaccattagtggttcctataagagtcgctttgttgactaccacatttgaaacatatgcttctgag

SEQ ID NO: 875 - DNA, 442 bp, Arabidopsis thaliana
gcggccgcctctgcttcttcttcttcacatcactgtgtgcgtctctctatctctctattctatcatttcgaaatcctctctatccgaatttgaactcgtctcttcttcgtaaagagttcttaatctccgtctctgtgatttcggaatctggaggttttgaatttcttgttcgtatcaatcaaatggtggatcgatttagtgagattgctttacctcattagcaatgacttctgcttcttccatgtccgtgtctgtggaatgtgtgaacatatgtaatctaacgaaaggagatgggaatgcaagaagcgattgcagtgctctctcctgtgcttggaaagctccaagagcgttaactgggtttctagctagcactgctcatccacctgtgtgttctgtgtattcatgtggcagaaatggaagaaagagcagaatgaaagcttgc

SEQ ID NO: 876 - DNA, 442 bp, Arabidopsis thaliana
gcggccgcctgatagatatcctaaagcactcgcatgaattgctttcacaagatctttccatagaccctttcagtctcatgttgaatgaaatgcaagaaaacatatctcttgtctcattttcaagtcgacttgctacacagatttggtcagagatgcagagtgatttcctaccaaacttcattctttgcaataccactcagcgatttgtccgttcatcgaaagttcctcctactcagaaaccatcagtgccttctgctaagcctagtttctattgtggcactcaagacttaaatgcagcgcatcaaagttttgcacgattgcatagtggatttttcgggataccacatttattttccatagttaaacttcttgggtccagatcattgccttggctaataagagctttactggaccatatatcaaataagataacaacacttga

SEQ ID NO: 877 - DNA, 442 bp, Arabidopsis thaliana
ttacaaatcaacaattctcgtacaagaatgcatcgtgtatgacaaattaatattcaaacaaataatatataattgtgtattcaaaaccatattatataagcgtagagaataatatcatcaaagacttgtgttgagcaactctctgtaatctttacgaattccccacaaaatctcactgcattttttcatgcttggtctcgaacgtctatgaggagctagacattgaaacgccatctccaataccttctctaatgctaagttgttcgctgaattctgttctagcttcgggtccaataccgatatcgtatctccactcgtgaacttcttgatcgcccatctaatggtgatgcgttctttttgtcctctgctaagctcgatgggacgccgacctgtgagaagctcgacgagcagtacaccaaaagagtagacgtcacttttctct

SEQ ID NO: 878 - DNA, 442 bp, Arabidopsis thaliana
ctcgcttcgttaatctttttcgccaagaagattaaacacttgaaatggaatcttcctccaagccctccaaagtttccggtcatcggaaatttacaccagattggagaattgcctcacaggtcacttcaacatctcgccgaaagatacggacctgtgatgcttcttcactttgggtttgtccctgtaactgtggtctcatcaagagaagcagctgaagaagtgctcagaactcatgacctagactgttgcagcaggcctaaacttgtcgggacaaggttactctcgcggaattttaaagatgtctgttttacgccatacggtaacgagtggaaggcgcggcgtaagtttgccctgcgtgagcttttctgtttgaaaaaggttcagtcctttaggcatatccgagaggaagaatgtaactttctggtcaagcaactgtcggaat

SEQ ID NO: 879 - DNA, 442 bp, Arabidopsis thaliana
  misc_feature (1)...(442): n = A,T,C or G
atagtttgtgtttattggacttctttcctctcatcttctccagcagaaacaaaaaaagctgaaagatgtggttttttggatcgaaaggagcatctggattctcgtctcgttcaactgcagaggaagtcacacatggtgttgatgggactggtctcactgccatagtcacaggagcatcaagtggtataggagtagagacagcgcgtgttctttcactgcgtggtgtgcatgtggttatggcggtgaggaacactgactctggtgctaaagttaaggaagatattgtcaagcaagtccctggagctaaactcgatgtcatggagttagatctcagctcaatgcaatctgtcaggaaatttgcgtctgagtacaaatctactggtcttnnactcaacctcttgatcaacaatgccgggattatggcatgtccttttatgctctc

SEQ ID NO: 880 - DNA, 442 bp, Arabidopsis thaliana
gtttctggtccggttccgccttatagtccacacttgaagaatttttggtatcccgttgctttcactgcagatctcaagcatgatacaatggtaccaattgaatgctttgaacaaccatgggttatctttaggggtgaagacgggaaaccaggatgtgtacggaatacatgtgcgcatagagcatgtcctcttgatcttggcacagtgaacgagggacgtattcaatgtccgtaccatggatgggaatactcaaccgatggagaatgtaagaagatgccgtctacaaagttactgaaggtgaagatcaaatcattaccttgtcttgaacaagaaggtatgatctggatttggcccggtgatgagccacctgcacctatacttccttctttacagcctccatcagggtttttaattcatgctgagcttgtaatggacctcccgg

SEQ ID NO: 881 - DNA, 441 bp, Arabidopsis thaliana
tgttcatacaacatgaaatatacgtagaaggtgttacatcaactagatacaagttttgagaacatattattcttgattgttttacataaaataacgaatgagcgagtgatgattacacatatataattaaagaaatagatagattcatagatatagagcttgtaactaacgagcgaaagccaattttcgcttttgagcatcggtaggcaatttgacatccgtggctaaaccgagagcttggaagaaacaaatgaggtaccaagttaagtctacctgataccattccagtccgtgcctggccgaggcctcaaaggcatggtggttgttgtgccagctctctcccatcgtgaatggccctagccaccaaatgttacgagaggtgtccttagtgttccatgctcgcgaaccccaaatatggcatgccgagtttatgagccaagt

SEQ ID NO: 882 - DNA, 441 bp, Arabidopsis thaliana
acatgtaaaccacccaaacgcagctaggcttcgcggtttcagcagtgatcgcggtttgcattttgttcttgagtacgctccctatggcagcctcgcttctatgctttttggatcagaggaatgtctagagtggaagataaggtataaagtggctctaggtatagctgatggtctgagttatcttcataatgcttgtccaagaaggatcattcaccgtgacatcaaagcttctaacatattgctcaaccacgattacgaagctcagatttcagatttcggacttgcaaaatggctcccagagaactggcctcaccatgttgtattccccattgaaggaacattcggatatctagctccagagtatttcatgcacggcattgttgatgagaagattgatgtgtttgcctttggagtattgcttctagagatcataaccagtcg

SEQ ID NO: 883 - DNA, 441 bp, Arabidopsis thaliana
aaactagaggaatttctgatccagagaatgggagttcgagttacggcggtaaaccgccgaatccactctccttctcttcttcctccgccgctgctgccgtttacaggcaaaccttcgacggcgagcgatcgttggcgccgtgtaataagaggtcactggttcgacactcatctctcgtgaagacaatggtgtcagatatatctgttgagaatgagtttactatagagaagaacaagtctgagtttgttcctgctacgcgttctggagcttggtctgatattggctccaggtcaagcatggaagatgcttatctatgcgttgataatttcatggatagctttggccttctgaattctgaggctggtccaagtgccttctatggggtatttgatggacatggtgggaagcatgccgctgagtttgcatgtcaccatataccga

SEQ ID NO: 884 - DNA, 441 bp, Arabidopsis thaliana
gaggtacaagctttagaattgaagcaagaagtgtcggtttaaattagaacaaaacccgcatcttcgttaggaggcaggcaacctcaagatgttggtcgtcggaagtcgctagtaggcaaagtgttgatccgatgatcttatatattcgacaaagtcgctctctgtcttgacagaccgcttctggtccgaagcttttgatacctgagactgaatctatccattgcaggtcaacatgattattgctaagaacacagcatactcatgtctgtattaatatattgcccataagatagtattaatttatgtagtagttttcatgtttctgtctttgtatcctcctccttcacttgtgtcccatatttgagaacaaacaaagctgtataatcaggtttttcgtatagatgtttttttccgctaaaaaaaaaaaaaaaaaaaaaaaaa

SEQ ID NO: 885 - DNA, 441 bp, Arabidopsis thaliana
aagaaaaaatttagtcaccttctagattctattgatctctccatatagaatcaaagattcacagtataaacgtataaataagctcttaacgatcttgttttgttttatgtgtcagaagtggaacactctggtttgctgagttcatcacccaacatgtgatgaagaagtgtatcaactctctgactccgagacttcgaccctgcagatcgacgcctgtttcttttttcttgagaatcctgtccttgacatttttcttcttcttcaagatccagctcagtaaagaacgcctccaagacaaaggcaacaaccaaattcaacagaagtaaaatagtgatgacatagaaactgacgaaatatgtaatgctccaccacgtgcccgtcaaatctttgtagctctccatccatacttgccagttacccataactagcagattgaagagt

SEQ ID NO: 886 - DNA, 441 bp, Arabidopsis thaliana
tctttcttgttcaatggctggtcaaaagatactttctttactggttatagctcttgttgttacttttgcagctgcggctcggcttcttgatgaagaaaatgcattctcagctaccacaaccacccttggctcaggttcaggttccaccggaattggttttggtgcaggaacagggtcaagtggttcaggttccacgggattcggttttggtgcaggatcagggtcatctggttcaggttctactggaagcggtctcggtgcaggtacagggtcaataccatcaagtggttcaggtcctggtcttctaccaactgccagttctgttcctggttctttagcgggtggtggttcaggttccttgcctaccactggttcagccactggtgcaggtgcaggtaccggttcagctcttggaggtggtccaggtgctggctcagctct

SEQ ID NO: 887 - DNA, 441 bp, Arabidopsis thaliana
ctttttttttttttttttttttttttttttttttttttttttttttgttttttttttttttttttttttaaaaccagacagtaatcgaatcattggtacttaaactagagaatctattagtcgtgtaacaaaaattagaatacaagacttaaaggaagagagagtgtattgatttggtgagagaagacaaaacaagttcctgaaacatagagaagtgtctacattctcaagtggaactttctgttttctgtttcttggccttctcaatcagaggtttcaactgtttcttctcagcaagaagtttgaggaagttgaacagaaacggaatgtagttatgcttcctcctaatgttctctgttctccatttcatgaacttctcttcctccattacaatcttatcactcgcagcctcgatcccactgcctacctcagcaatcaacg

SEQ ID NO: 888 - DNA, 441 bp, Arabidopsis thaliana
gcggccgcaagacctgctcctatgccgtactggtctttaggatttcatcaatgtagatggggataccataatctatcagttgttgaagatgtggtggataattacaaaaaggctaagatcccacttgatgtgatttggaacgatgatgatcacatggatggtcacaaagatttcacgttgaatcctgtggcttatcctcgtgctaagctattggcgttcttggacaaaatccacaagattggaatgaagtatattgtgatcaatgatcctggtattggtgtcaacgctagctacggtacatttcagagagccatggctgctgatgtgtttattaagtatgaaggaaagccattcttggctcaagtgtggcctggtccggtttacttccctgatttccttaacccgaagacggtttcttggtggggtgatgaaatcaaacgg

SEQ ID NO: 889 - DNA, 441 bp, Arabidopsis thaliana
atatatattccaagttaaacttcatatcatacacacaaacctaaaacaccgaaacaaaaacaaagagatttaaacaagaagagttattatggcgagcttgctagataaagccaaggacttcgtggcggataaactcaccgcgatccctaaaccggagggttcagttacggacgttgacctcaaagacgtgaaccgtgactcagttgagtacttggccaaagtctctgtcaccaatccttacagtcattcgattccgatctgtgagatcagtttcactttccacagcgccggcagggagattggaaaggggaagataccggacccgggttctctgaaagctaaggacatgacggctcttgatattcccgtggtggtgccgtatagtatactgtttaacctggctcgagacgttggtgtggactgggacattgactacgagct

SEQ ID NO: 890 - DNA, 441 bp, Arabidopsis thaliana
ggtcgcggccgaggtacaggaagccttcttgcctctcttgcagaagctgcgtttctcattggtcttgaaaagaatagtgacattgttgaaatggcaagttatgctccactctttgtgaacacaaatgatagacggtggaaccctgatgcaatagtcttcaactcctctcatctatatggaacacctagctattgggttcaacggttttttgcagagtcaagcggagcaactcttctcacttcaacactcaagggaaactctacttctcttgttgcatctgctatctcttggaaaaacaatggcaaagattacatacgcataaaggctgtaaacttcggagctaactcagaaaatatgcaagtgttggtaactggattggacccgaacgtgatgagagtttcgggatcaaagaagacagtacctgcccgggcggccgctcga

SEQ ID NO: 891 - DNA, 441 bp, Arabidopsis thaliana
ccacgcgtccgccaaagagaagaacaaaacatcatcatatattctattgactagattaatttcttctaagtgcaaaagaggagaaatggagtcaatgaagatgaagctcatagtggtgttgatggtggctattgtggctttctccgccgtaggaaacgtggctgcgcagacagaggctccggctccaagtcctacttccgatgctgctatgtttgtcccggcattgtttgcatctgttgctgctttggcatcagggtttctcttctaaaccaatctccacatttcattgagttaggttctaaattgttttgccttttactttcgtttatgtcttatggcatgagctttttgttatttgtttctaatatttggactactatgtgttgtgtgtatatgattcataattaatactatatttatggaaaaaaaaaaaaaaaaaag

SEQ ID NO: 892 - DNA, 441 bp, Arabidopsis thaliana
  misc_feature (1)...(441): n = A,T,C or G
acatgatccaacatctcttttgggtttcgactaaaagggaagaggaacatgaaaaaacctcatctcgcttgaaagtagtctaacaaaacttcctagtgagataaaacaagttccatcccataaaattaagaagaccaagatttgtcctaaaaaccaaatgtacaatgaaaactgaagcccaaaagtgtataaacgtatccaacttcttcctctcagtcctcaattgtctgaatctctcccatcatgatccggttactaaccacattaaatcccagaaccgatgcgctcaagctaaccttcttccctttcttcgcctttttctttcctccaactttcgagaacccgtcatttgcagctgtagtgctatagtaatagtcttcacctnnnntgtttcgggtcccgactcccgagccctttgattgaaatgcaatctcaactact

SEQ ID NO: 893 - DNA, 441 bp, Arabidopsis thaliana
taacttccactggaccaacagttactctgactaccgtatcggttgctctgttcccggaaagtacaaaatcgttttggactctgataactctttatttggaggcttcaaccggctagatgactccgcggagtttttcacctctgatggaaggcacgacgataggccttgctccttcatggtgtatgcaccgtgcagaaccgctgtagtttacgctgcagtagatgatgatgatgatgatgaacgttcttctcttgtccccataggcctgttacccgaagatgtttaggagcaaagacagttgtccgagtttacctactgtaagcttctttgtactacaaaaatttactcgttgatcttcttctcctttagttttcgcttgcagcatcattataacttaaaaatgaaataaaaagtcgttgcactaaaaaaaaaaaaaaaaag

SEQ ID NO: 894 - DNA, 441 bp, Arabidopsis thaliana
tcacaaacaaaacagagtttctgtcatctccaacaaaatgtttgcacaacaaaaaagccacacatgcacacactattacattaaccaatagaacctcaaaccgaactgaaccaacccaaacaaacacaaaaccaacttctaagtgttctcttcaacatataatatataccaagtagttccagtcattgatgccttaagatcaatgaacacacacaaacgaaatgttcttgctgttcgaaatcaagctgcgagtactataatcacgatcaggagaacaatgccaaatatcaccaagagcaagcatgtcagagaggagtttgatttttgtgttttcgcggcttgcacaagctgagattttccttgtgaagttgcagcacgggagttgtcaatgtgagtaccaatatcatctatcatgactccttgatcgttaaccagaaccgc

SEQ ID NO: 895 - DNA, 441 bp, Arabidopsis thaliana
aatcaatctcactgcaaaaccaagtctccatgaatctcgcaaaacacgtaatcaccaccgtctctcaaaactccaacgtcatcttctcaccggcttcaatcaacgtcgtactcagtataatcgccgatggatccgccggcgctaccaaagatcagatcctctcgtttctcaaattctcttccactgatcaacttaattcattctcttccgaaatcgtctccgctgttctcgctgacggtagtgctaacggtggtcctaagctctcggtggctaatggcgcctggatcgataagtctctctcctttaaaccttcctttaaacagctcttggaagattcgtataaagctgcttcgaatcaagctgattttcaatcgaaggctgtggaggtgattgctgaagtgaattcatgggctgaaaaggagacaaatggtctcatcactg

SEQ ID NO: 896 - DNA, 441 bp, Arabidopsis thaliana
ggttgtttgttgacggaagcttcttcggtctctcttctccgtcttacgattgtcaacgcgtggttccatcttcaattttgtttctattttagcagaagtttctcgagcttcaaatactgtttcagatcaatcaatcagtcaatcatggctagctctggaaacaagaacatcaacgccaaattggtattactaggagatgttggagctggaaaatcaagtcttgtgctacggtttgtgaaagatcagtttgttgaatttcaggaatcaaccattggtgcagcttttttctctcaaacattggctgtgaatgatgcgactgtgaagtttgagatatgggatacagctggtcaggaacgataccacagtttggctccaatgtactacaggggtgcagctgctgctattattgtctttgacattactaatcaagcctcatttgag

SEQ ID NO: 897 - DNA, 441 bp, Arabidopsis thaliana
gcaagcctgttcacttttccactatgtatgtaatttatagaacatgatgtcaacaaagattcacacacttcgcaaagcaatgagcttttacattgctctataaataagtatactttttcatatacgtgagttggaaacataagctttttaagccacatgaaaatgctcaggaaaacacaaggtttacaatcagatgaggagataaaaagtcgtggcaacgcgcagaatcgggatggattccttaagagacagatgcacttaaatgcaagatggtagagtaggtccgtggcagagaaaggccactgcaatgtatatgatcaccagtagtagtagtattaagaggaccgtgagcttgcagtttctccaccagacgttgcttctaaaacgacgagcttgctttctgaaccggaatgtattcccctgcatattggcggttttatc

SEQ ID NO: 898 - DNA, 441 bp, Arabidopsis thaliana
ccgggcaggtgtgttctttgttctctctctcgcgcgaagcggttctctttcttttgtttatttgtttttatttgtttttctcttatacggaggagagaagatggtggcgcctgctttgttaccggagctctggacggagatccttgtaccgatttgtgcggtgattggtatcgccttttcgcttttccaatggtacgttgtatctcgcgtgaaactcacctctgacctcggcgcatcgtcttccggtggagctaacaatgggaagaatggatacggtgattatctaatcgaggaagaggaaggtgttaatgaccagagtgttgtcgctaagtgcgctgagattcagactgctatttccgaaggtgcaacttcattcctattcacggagtacaaatatgttggtgtcttcatgattttctttgctgctgttatctttgtttt

SEQ ID NO: 899 - DNA, 441 bp, Arabidopsis thaliana
ccacgcgtccgctctcttcctcatatatttccaaaacaatacctttcttcttctctcttcagaagaaacgagagattcgagtgatgttttatgaactactactagtgtttttttccgtgaagtaaagagaaacggtaactttttctatttgttttcaagaaaagccaaagaaaaaaagaatttttaatatactctgttttttgcaatgattttgttttgtgaaatttttctcggagaagaaagtaatttagaagacggagagtggcaaaacgaaatataaaaaaaaaagttttcaatttcttttaagaaaaaaaaagctttttcccttcttaaaacccttcctctgtttcagaaacagagacataagaagaaaatagatcacaagctaattgcgttctcttctcttcttcttctactggtaaattttctctgcttgatttc

SEQ ID NO: 900 - DNA, 441 bp, Arabidopsis thaliana
tttttttttttttttttttttaatataagatgtgcagcctatataaatagtgaaaacaaattctagttcattcattacaatttcccaaaacgagtataagaactcgcccaaaccaacaaataagtaattgactaaaacaatactctcctcccctctctgggcaggacagcatcaaacacacctaaagccattctatgacaaaaccaaaatggcaaacaaataacccctgtgagtttccataactacacagggatgcaaagaatgaaataaactcggcctctccacaaatacaaaggccggagactgaaccccaaaacaaagaagaagaaagaatggaaaccgaaaagaagataatatacacaaaatgcccataggaatgcagcggctcacacgatgtatttatgtatatgcggtagatgcaatcgtatttgatggaccata

SEQ ID NO: 901 - DNA, 441 bp, Arabidopsis thaliana
ttttttttttttttttttttttttggatttttacccaaatcttattatttcttgcaaaaaaacgtttcacaacctcttatctgttttcgatgaagtgtggaaaaactacacgaatcagtgtaaaccccaaaaagaaaacgaaaaaactctcctctgaagcagctccagcagtaattgtgtcatttctcattgcttattgtcttatgcggatgattctactttcagaacaactttcatgaactcgtaaacaaagtaactgattgccgcggaaggcaaaacctgcaataagctgggaatcaagccagcatatagagcaggaacacctccttgttcaatgatcttcacacaagtagccactgcgcttaaccttttagcatgtgactgcatttgtaaacgccttctcacaacttcaaacggatatgttgctgctcggacgcgtgg

SEQ ID NO: 902 - DNA, 441 bp, Arabidopsis thaliana
gcggccgcgccagtagctgcagttccaccatcatgtacaccatccttctcttcatcctcatcatcaacaagaggctgctttggcacttccatacttacaatagaaaatgtggtaacaacaacatcatatttagccaactcatgaggatcctttgttctgctagacccatggtataccagaacagagagatttgcttcactagtcaccttcttatgtaattcatcagcccactgccgcataacactagtgggacatacaacaagcgttccagcagctggccttcccgtcactttacccacactgtctccaccaactttgttttcattggaaagcaattgagagtgttcaaaatgcttgcttcttccactgggttttaaaggcgcacattctccagtctcgctttctaggtcaaaaatttctttcttcgtactttcttcacat

SEQ ID NO: 903 - DNA, 441 bp, Arabidopsis thaliana
  misc_feature (1)...(441): n = A,T,C or G
attgtactagttctcgggtttgtaccactgatcctgtgaagatactttcacaaatcatacaagattatgtaaatgagattccccctcattaagatttctttttttgttactctgaaacaaatatttctttttcatctttttaacgcaaatccctacataaatcctaaatattttagagtttgagcaaatatttacactagctccatttgttccaattgtctgatggcttgttaaatgtcgaggctgatgtttgnnnnggattgctcttaggcatcttcttcttcaacttctttgggctctccatgtgagagacaatgtgagatttccactgggttgtctctgaactactgtcatgtggaggatgatcgcgaacatggcgaaatatgtgaatcaacactgcagcatcaagagcagcatactcaagctgattctggctcaaag

SEQ ID NO: 904 - DNA, 441 bp, Arabidopsis thaliana
  misc_feature (1)...(441): n = A,T,C or G
gacatacagataagttagtattattttatgaaaatttgagtgaataatacgaattgaacaaacacaaactcgacaagtacactctcatnnntctaacaagttcataatcacacaatacgaataattctttgtcacacctgattctatatgcacccattgactataacaaaccgattctaatataccttttagtttctccatatgcattggatctttaacaaggtccatgaataatccgacggctaagaaacacaatcacataagatgctggtgatgatgatcgttagatgaagaaccggggagaccttgaccggtccaatattgattggattgattccctggagatgtcaacccggaaaccgggcggcttatattacccaaatggttgtcctccattttcacctgagcagtttgagaaaccctagtagcaccaatagaaga

SEQ ID NO: 905 - DNA, 441 bp, Arabidopsis thaliana
cctctagagcggccgcccttttttttttttttttttttttttttttttttttttgacacctaaaacccctcaggtagtatttctctgcaacctgtacttgtgagaatcaattatacaaatgattttgttactaaagaaaagaccgaaagaaagaaagagacgcaaatatgatctgatctgattagatcggcgcatagattacccgtgggatcttgggattttgtactgttttttcagaaactgagatgcctctgaatcgtttctgtggcaaagcactcgtaccaatgtttgggtgtccgctccaagtttgccttttcctccttgctgcatctctagactgcttctagacctcaagtcatcaataagctcccgtgtctcatatccgtgcaactttacaacaagacgaactctggctacttggttttcaaccactcctctcgg

SEQ ID NO: 906 - DNA, 441 bp, Arabidopsis thaliana
tctagagcggccgccctttttttttttttttttttttttttaataacaaacaccaaattgcgttgcgaattgtaaatatacacagtagacgtagagatttctgcagaaacgtctattagaagaaaaacaatcagcaataaatcaaagaagaggttccttgttggtcacgaaattacagaagaaaatcaaagctcgggctgcatttgctcgcactcttctcgaatcgactggaaaagctgggtcgagaggtaacgttccccgaagctcgggaacacaacggctatgagtttcccggcattttcaggtctctttgcaacctggattgcagcagcagcagcagctccagaagatataccaaccaacaagccttcctggagagctagttgcttcgaggtttcaatagcttcctcactggaaatcgctatgtattcatctacaata

SEQ ID NO: 907 - DNA, 441 bp, Arabidopsis thaliana
catccttattgcagctctctcgctcattgcattttctcctttttgtttgtgttccaaagcctatggaagtggcggctatctctttcctcagttttatgaccaatcgtgtcctaaagctcaagagattgttcagtccattgtcgctaaagcattcgaacatgatcctcgcatgcctgcctccttgctcagactccatttccacgactgtttcgtcaagggatgtgatgcttccatactattggacagcagtggaaccataatcagcgagaaacgatcaaaccctaacagaaactcagcccgtggtttcgaactcatcgaggaaatcaaacatgccttagaacaagagtgtcctgaaacagtttcttgcgctgatatcttggctctagccgctagagactcaactgttattacgggtggaccgagctgggaagtacgtctagg

SEQ ID NO: 908 - DNA, 441 bp, Arabidopsis thaliana
gtgaaacccgccatccagagagttgcctcaagaggagctttaatgtctcccaccgttccaaaagatcatgaaggcatcaaggctcgagtcctagtaatgttcatggcattcttgatggcggttttcacattcttccgcactgtaacaaagaaacttccagcgactactacttcttccccagcagaaacccaaggaaacgcaatagaacttggttctaacggtgaaggagttaaagaggagtgtcgtcctccttctcctgtaccagacctcacgaaaactgatctactaaactgtgtgacgaagaaactgacagagctggaaggtaaaatcggaacgctccaatcaaagccaaatgagatgccatacgagaaagaagaactgttaaacgcagccgtctgcagagtagacgcacttgaagcagagctcatagctactaaaaag

SEQ ID NO: 909 - DNA, 441 bp, Arabidopsis thaliana
cggccgcggcaattcatccttttattgtctaaggccattatcaacaaggatatgtatcaagtgtttcagtcggttataaatgactttagtgcaacagaaaaccccatttgtaagattcatgaaatatgtgatatacactatagtgaatgtcttcgtttggagcaacgaacaccaaacaacaatatcttttagcatatgtacttagaaatctcatgtttcttcctcttttcctcggaaagccatcctctctcgaagaatcttctgccccatatatcttccgagcatcatgattgtggcctgtggattagtccccggagacttgagaaacgtggatccatcgatgatcctcaaagcatcaacccctaatactttgtaattgttgtcgaccacttttccaacttgacaacctccatggtaatgataaatagtcatcacggtatc

SEQ ID NO: 910 - DNA, 441 bp, Arabidopsis thaliana
acggcaaatgcaacggagccacgacggtgaagttaccggagatcaaattcaccaagcttttcatcaacggccagttcattgatgctgcttcagggaagacgtttgagacgatagaccctaggaacggtgaagtgatcgcaacaatagccgaaggagacaaagaagacgttgacttggccgttaacgctgcacgttacgccttcgaccatggtccttggcctcgcatgaccggcttcgagagggcaaagcttataaacaaattcgcagacttaatagaggaaaacattgaagaattggctaaacttgatgcggttgacggtggaaaattgttccaattggggaaatatgctgatattccggccacagccggtcattttcgatacaatgcgggtgcagcggataaaatccacggcgagactcttaaaatgacgcgtcaatcgt

SEQ ID NO: 911 - DNA, 441 bp, Arabidopsis thaliana
  misc_feature (1)...(441): n = A,T,C or G
cagccagtgtttgtgtacatcccaatgatgggagagctgcgcggtggagcgtgggttgttgttgacagccagataaattcggattatgttgaaatgtatgctgatgaaacagctcgtggaaatgtgcttgagccagaagggacaatagagataaaatttagaacaaaagagctattnnagtgcatgggaaggttggaccagaagctaatcagtctgaaagcaaaactgcaagatgccaagcaaagcgaggcctatgcaaacatcgagcttctccagcaacagattaaagcccgagagaaacagcttttaccagtttatatccaaatcgccaccaaatttgcagaacttcatgacacttccatgagaatggctgcaaanngagtgatcaaaagtgttgtggaatggagcggctcgcggtccttcttctacaaaaagctcaat

SEQ ID NO: 912 - DNA, 440 bp, Arabidopsis thaliana
  misc_feature (1)...(440): n = A,T,C or G
tttttttttttttttttttttattcccaaaattaccaatcaatctaatataacaacatctgaaatgtatccatacgattacaaagatacaatagaagttttcacagggacaaataataattcattattcaagttaacaaacaaagacacaaataaaaagaaacactacgcagagaccaacaaaggacactcttcganaaatccttaaaagaaaaaatgacaaaaaagactattatatattaacaataannaatgaagcaagcaggtgaaaccaaagaaatgaagatacatataactcttcgactggtaaattcaaactataaaagcagcaaagtatatgatatgtgatcatattcatatcgcacgtgggcttctggctagaaagcattccaattatcagaactccgaggtgtctctgctgtagttgtcgttgttttgaat

SEQ ID NO: 913 - DNA, 440 bp, Arabidopsis thaliana
  misc_feature (1)...(440): n = A,T,C or G
tgttacaaaatacatttattatttgcaatgcgactgacaacagaaaataaattttatctttttaccaaacaaaattaatagtatattacaatataaatgtgcatttaggatgtccccgtaagcgaannnnnnaattcttccaatgattgtcctttggtttccggtacgagcatccaaataaaaatgaatgacattcctccgacagccgcaaatatgtaaaatgttccttgtgcgctccattcaaacataaagttgaaagcgtaactcacgaaccacccactagtccatgatgttaatgctacaattgttcctgctgaaacttttatatttatcggaaagatctcagacataatgacccaaggtagccctcctataccgaatgcaaaacatccgaagtagaccagaatgtttacgaagacgaaaattgggatcaattcagg

SEQ ID NO: 914 - DNA, 440 bp, Arabidopsis thaliana
ccacgcgtccgccaagagatggcaagagttgttaaaatcgattctgcagagtcatggaatttctatgtgagtcaagccaagaatcagaattgtcccattgtggctcatttcacggcattatggtgtattccttctgtgtttatgaactccttcttcgaagagcttgcgtttaactataaggatgctctgtttctaatagttgatgttgatgaagttaaggaagtggcaagtcaactagaggtaaaggcgatgccaactttcttgttcttgaaggatggtaatgcgatggacaaactcgtgggcgcaaaccctgatgagattaagaaacgggtcgatggtttcgttcagtcctcacgtgttgttcatattgcttaagagagatttatagatacgagcagaatactaaataaagtttgtgtgaagtgtaattagtttgtaac

SEQ ID NO: 915 - DNA, 440 bp, Arabidopsis thaliana
acttcatcatttgatttaactttgtttcagctgtttgacataagtcgtttatattttttcttgaatgcattttgcgacctaattgtttttgtgactaccattgaaactgcagtttaaagaaagtgtatccaagtttgcgcaagatattatcgctcctcatgcagaaagaattgataaaactaattcatttccaaaggatgtaaacttatggaagctaatgggtgagtttaatctccatggaatcactgcgccagaggaatatggagggctaggtcttggttacttgtatcattgtattgcaatggaggaaatcagtcgggcctcgggttcagttgctttgtcttatggtgctcattccaacctttgcatcaatcaattggtgaggaatggaactgcagcccaaaaggaaaagtatataaccaccatctaccttctcagcc

SEQ ID NO: 916 - DNA, 440 bp, Arabidopsis thaliana
tgattcattccgatggttatctagagattaaagatagatcgaaagatataattataacgggaggtgaaaatgtgagtagtgttgaggttgaaacggttttgtatacgaatccggcggtgaatgaagtggcggtggtggcgagacctgatgtgttttggggagagacgccgtgtgcgtttgttagtttgaaaagtgggttgactcaaagaccgacggaggtggaaatgatagagtattgtaggaagaagatgccgaaatatatggttcctaaaacggtgtcctttgtggatgagctgcctaaaacttcgacggggaaggttatgaagtttgtacttagagagattgcgaagaagatgggtacgacgaggttgagtcggatgtaaaattagaacttgcgaatttgatagaacaaaggcttaaagtgtacctcggccgcgacc

SEQ ID NO: 917 - DNA, 440 bp, Arabidopsis thaliana
atcacttagccgcactgtttgccagaggattgaagctgaaggtgcagtatggtttcttattaatcttctgaagcagccagagatctcactaaacgttacagaacacgttctggatataattgctcatatcttagatcctagcaaggaaatggaatccaagttttatgaaggaccggtgaacggatcaaaagcagactccagaaaggaagttctggacgctgctgttttttctcggctcgtccagattgcgaaaacagcctctccgaacctgctaagaaacgcaatctctgtcatcgagtttggtataatcagtaatccaaacatggacacgatcatctccaaggatatcacaactgttcttgatcttgctctccggcagaaagtcctggaagaacctgagaatgaagctgaggagttagagaaacatctgcttaagctag

SEQ ID NO: 918 - DNA, 440 bp, Arabidopsis thaliana
gatgtctaattatggtttcaaaaacgtcatttcaatggacgaatatgcctcttactttgacaacattgatcccttggcgccatataagaaattgatgttcaggcaggatggtcacaaggagcttagatcaagagaagatgttctatcccaaagagttcaggcagcattaatagttagtgatccagttgattggagccgagacatccaggttctttgtgacattttacgaactggaggacttcctgggaaagaaattggacctcaacctcatttgtacattgccaatgacgatttagactaccagactgagtttcctactgaacgtcttggcatgggagcttttagaatcgcgttagaatcaatcttcaacagaattcatgaaaaacctctagagtacacatcatttggcaaaccaaatccatttgtgttcaaaaacgcag

SEQ ID NO: 919 - DNA, 440 bp, Arabidopsis thaliana
  misc_feature (1)...(440): n = A,T,C or G
agatgacaacgacgtcgacgatttcgatgagtttgatccaacgccgtacagtggtggttacgacatcacggtgatctacggccnnncgattccaccttccgatgagacttgttatcctctctcatctggtgtcgatgatgatttcgaatacgagagacctgaatttactcagatccatgagccttctgcttacggtgatgaagctcttaacacagagtacagtagctattctcgacccaagccacgacccgcatttcgacccgattcaggtggtggtggtcatgttcaaggtgaaagaccaaatcctggttatggatctgaatccggttatgggaggaaaccggaatctgagtacggatctggctatggtggacaaannnaggtggagtatggtcggagacctgagcagagttatggatctggttatggtggaaggacgg

SEQ ID NO: 920 - DNA, 440 bp, Arabidopsis thaliana
  misc_feature (1)...(440): n = A,T,C or G
gatgaaggaaggagaaccgcagggatattctctcatttccaacgcccaaacctcgaaacgaatgctgacatcattcacatcaagatgttgaggaacaacacttttgtcacggttacagattccaaaggaaacgtcaaatgcaaagctacatctggtagtttacccgatctgaaaggtggaaggaagatgacgaattacacagctgatgcaaccgctgaaaacattgggagaagagctaaggctatggggctgaaatctgtggtggttaaggtgaacggatttacgcatttcggaaagaagaagaaagctattatcgcgtttagagacggtttcaccaactcgagntctgatcagaatccgatagtctacatcgaggacactactaggaaagctcataatggttgcagattaccaaggaaacgtcgggtgtgaaaagaaaa

SEQ ID NO: 921 - DNA, 440 bp, Arabidopsis thaliana
ggtcgcggccgaggtaccatcactatctctcaaaaaatacttgcaaaccggttcggctgcatataccctctcgatctttccggttcgaccgttctctccggtttcaatcatacggcacttcaagatcgagtggctgacaagtaagctcagcatccggtcaagcaacaccggcgcctccgggttggtgggtttggttgggagactacacgctatctcacacggtgagagccacgtgtcgtttcctgcagcagcgatggtgtcgatgacgccaagctcgaaggcggctttgagaaccatagggaaagccacggtgttcacgatactctctgcttgcaagcttaccattttctcgtccacttcttgttcttctttggttaaaaccggttttgggtaagtaggtaagggatcttgaagatggtacctgcccgggcggccgctcg

SEQ ID NO: 922 - DNA, 440 bp, Arabidopsis thaliana
aaacaaagatggttttgacaaaaaccgcaacgaatgatgaatctgtctgcaccatgttcggatctcgctatgttcgcactacacttcccaagtatgagattggtgagaattcgataccgaaagacgctgcgtatcagatcataaaagatgagctgatgcttgatggtaacccaaggcttaacctagcttcttttgtgactacatggatggaaccagagtgtgacaaactcatcatggactctatcaataagaactacgttgatatggatgagtaccctgtcacaactgagctccagaaccgatgtgtaaacattatagctcgactgttcaatgcgccactcgaggaatctgagacggcggtgggagtagggacagttggttcttcagaagccatcatgttagccggattggccttcaaaagaaaatggcagaacaaacgc

SEQ ID NO: 923 - DNA, 440 bp, Arabidopsis thaliana
  misc_feature (1)...(440): n = A,T,C or G
gaggtacttgaaggatggttataagcatatccatatatggcatggttcagaacacnntcagttcaagcagaaggtaggaatcgaattctctgaagatgaagaaggtgtccaacacagaaccagctccgaaacatcatcacaccctccaggaaccattgtggcccccatggctggtttggtagtcaaggtccttgtcgaaaacgaagccaaagtagatcaaggtcaacctatattagtcctagaggcaatgaagatggagcacgttgtgaaagcaccatcctctggaagcatacaggacctcaaagttaaagcaggccaacaggtttcagatggcagtgctctattcaggatcaaaggttagtggtaatttagtaccagcattttttcctttatacatttcaaaaggatgatatgaaatacctgcccgggcggccgctcga

SEQ ID NO: 924 - DNA, 440 bp, Arabidopsis thaliana
cgatgtcgtttacacgaacaatcatcatgttgggtcttatggaacttatcacaacctggaacatcatcatcatcatcaccaacatttgagtttacaggcagattatcatagttatcaactacatagtcttgtcccatttccatcacaaattttggtatgtccaatgacgacatcaccaacaactacaactatacaatctttgtttccatcatcatcgtcagctggttcagggactatggagacattagatccgaggcaaatggtaagccattttcaaatgccattaatgggtaattcttcatcttcgtcttcccaaaacatttcgacattatattcgttgttacatggtagtagtagcaacaatggtggtagagacattgataatcggatgtcgtcggtccaattcaaccgaactaatagcactacaacggctaacatgt

SEQ ID NO: 925 - DNA, 440 bp, Arabidopsis thaliana
atcgtttacaagcggatcaatcatcttgcaaggtccacaccatggtgcccaaaagtcgacaactacaggcccagttgctttaagaactagagagtcccatgtcgagtcattgaccacttgaatatcggtagtagtttcctgagcttcacagacgacggctcttcgtaatcgagaaaccctaggttgatgaatcgaggtcaacgaagccggagagagagaaagacggattctcaaacctgatgattccggtaagacggcgaacatccgccgagaagagagagaagaagccgatggtgatgaggatacgattctggtatcggaacggagagaaatcggaggacgagaggtacaagtgaaagcagccatggctatagatagagagaggagaggtttctccaaatccccaagtgtaaaaataacctgcccgggcggccgctcga

SEQ ID NO: 926 - DNA, 440 bp, Arabidopsis thaliana
  misc_feature (1)...(440): n = A,T,C or G
tacaagttgaggaggtggactatgacaaagacggatctgttttgcgcatacgtggcaaaaatatcctggagaatgagcacgtaaagattggtgcattccatactttggaacttgagctgaaacgaccttttgtgttgagaaaggaaatgtgggactcaatggctcttgatacactcaaacaggcctcagatcccgctgctagtgctgatctagctgtagttctaatgcaagaaggactggcacaaatcttccttgtgggcagaagtgtgacaagtagccgtgcacgaatagaaacatccattcctaggaagcatggacctgcaattgctggttacgagtctgctttgaagaaattttttgagaatgttctgcangcctttgtgaaacatgttgacttcagtgtcgttcgctgtgcagtagttgcaagtcccggcttcaca

SEQ ID NO: 927 - DNA, 440 bp, Arabidopsis thaliana
  misc_feature (1)...(440): n = A,T,C or G
tatagatttacggatttgacatcattcactgagtaacaacaatactttaagttagttcccttgtcataattattaaccaaagtaaatatcatcacacctatcgtcaaagtcgtcacatctcaaacgtgcttcaatctcttcatccttggttgcacactgaccaaccaaccctcacgacgatttttcctttccgtgattgagccatgtctcctcttcaaaccaaagttgaacagagccatccaatggcaaaaccggaaatttgtgcaatccaggacatcaacaagcgacagcttctgcatctggctgagactcttgactatccgtctcagtaagcaaagggcttttctgaaacttattcctcagctgaccacaagcagcacttgcatcnnntcctcttgtttgccttacgcttgctgttatcttacgcgactccaacgcag

SEQ ID NO: 928 - DNA, 440 bp, Arabidopsis thaliana
ccaaaaagctccctccttttctctcaaaatggcgtctgcaaacgctctctcttccgcctccgtcctctgttcttcccgtcagagtaagttgggaggaggaaatcagcagcaaggtcagagagttagctacaacaagaggacaatcagacgttttagtgttagagctaatgtaaaggaaatagcttttgaccagcactctagagctgctctacaagctggtattgataagcttgctgattgtgttggtctcactcttggccctagagggaggaatgttgtgttggatgaatttggaagtcctaaggttgtgaatgatggagtcaccattgctagagctattgagttacctaatgccatggaaaatgctggtgcagcgcttattcgtgaggttgcgagtaagactaatgactgctggtgatgggacaaccactgcgtctatc

SEQ ID NO: 929 - DNA, 440 bp, Arabidopsis thaliana
  misc_feature (1)...(440): n = A,T,C or G
ctagagcggccgccctttttttttttttttttttttcagtataattagaacattaatgtcttttcacgtggaactgctggagggagtttataagtaaaatgttgtacctttgtaatgaaacaacgtgcattactaatgacaaatctatgacaatcaaatcagctgagtctcatatctcaccgtcccagagttcttcaagactcttatatggactcgtctcatgaacaaatgacatgcctcgcaccaacctaccctgtccaatctcagaaaacttggataacatgtcttcgggtatggaccagttgaaaacatcgaaattctgtttgatcctgtcttcatgggtgctttttggaagaacactttgacccatttggagancccagcgtaatgcaacctgtgcaggagtcttgccgagcttctcagcaacaccaccaagaata

SEQ ID NO: 930 - DNA, 440 bp, Arabidopsis thaliana
  misc_feature (1)...(440): n = A,T,C or G
cctctagagcggccgcccttttttttttttttttctttttttgggaacttaagaatacaagaattcttgatctgatgttttcctactaagcgtctttgttttatgtaatatgttttagatttctgaatcatcttgattgatataataaactcagatctctatttcatgagatttctcaatgggattagataatgcaggtccttcccacagctccgcaagatcctttctccgccatgacatgaagatcaccggtcctaacgtagatggtaccagataaagtagagctggctgaggtgagtgggtcaagacacctgcagctagagccgccaccaagccaatggcatatccgggaagtgcataccaaatgtatttgtgtnncttggaagattttagatcaaaaatattcaccacatctctagtttttcgatggtcaaagcaga

SEQ ID NO: 931 - DNA, 440 bp, Arabidopsis thaliana
acgtaagcttggatcctctagagcggccgccctttttttttttttttgacctaatcaatgttttggttatatttcattactagcaacccacccacaaccacatgacaatttacaagagaaaaacaaccaccaggtttggtttgtatacatatataacttaggttgtgttacaacttaaaacatcattgcacatcctaaaaaatttacagcgacagatgtgtttttgttgtgctcttctttatccactcaagtaaccatcatcactataacttacccaatctagtttgggtttggcttccacacggaacatgtagccatgggtcgtctcttccagaagaggtagagcgctccttcatggcctcccagtttgtagtttttgtcataagctttcagcatctcactcgctgcaaacgctgcagatgtgctgaccggccaacccg

SEQ ID NO: 932 - DNA, 440 bp, Arabidopsis thaliana
  misc_feature (1)...(440): n = A,T,C or G
cggccgcccaaaatcgaaatcgcatcataatcttaaatctctcttctttctacgaattttcatgtttatgttccctctctcttgattctccaccatttcactattcacatattttttttttattgataaagttttctcctttttttgagttttacgagaggatttttcaaaggtctaaactttcttgggatctatcagattgtcttgaaactaatgcttacgggttttaacaggttgattgattgatcataccaccatggatatgcatcatctctgaacnnntggggaaacatttctgacatttaatggatcctcaagctttcattcgtctttcggttggctctcttgctttgagaattcccaaggtccttataaactctacttcaaaatctaatgagaagaagaacttttcttctcaatgctcttgcgaaataaaacta

SEQ ID NO: 933 - DNA, 440 bp, Arabidopsis thaliana
  misc_feature (1)...(440): n = A,T,C or G
cggccgcttacaatggaaggtactccgcagaacaggggtgtcaattatagaaccgtcgagcaattgtttgaagttgctagagaaaggagagagaccatttcatataacatatcggttagtgtccttgaggtctacaatgaacaaataagagacttgttggcaacatcaccagggtcaaagaagttggagataaaacaatcctctgatggctctcatcacgttcctggattagtagaagcaaatgtggaaaatataaatgaagtctggaatgnncttcaagctgggagcaacgcaagatcagttggatcaaataatgtgaacgagcatagcagccgctctcactgcatgctctctataatggtgaaagcaaagaacctgatgaatggtgattgcacaaaaagcaagctttggcttgtagatttagctggaagtgagagatt

SEQ ID NO: 934 - DNA, 440 bp, Arabidopsis thaliana
gaaattcgaataaagttaacaaaatttttacgaatcctacaccagaaacttgactgcgtctgcaacaactttctcgataataaagagacctaagagttgacatatagctcaccatccaacattgaaaattctaggatttctagacccacgggttcttcttcgctgattttgaactcaatccagagcttgttttcgatttcagtttctttgctttaccacgaatcctgttcctgggaggtttcagcttgtatagccgaaccatccaatggtgactcgtgaaaacctcttcgaaatgtgtaagcttaaaatgcttcttcccaatctctgtccgcctcacccgatcataacctttaccatccgtctctacaaacctgtagtaagagagcttgtacataaggctgttcaacattgttggagtggcctcagaatcaatccggtat

SEQ ID NO: 935 - DNA, 440 bp, Arabidopsis thaliana
caaaggatgttgcaagtacggtggtcctggttacgcgactcctctcgccgctatgtctggtccatcggagaaacttatctacgtaaccgccgtctacaccggaactggaatagataaaccggattatttggcgacggtggatgtagatccaagctcgccttcgtattcaagtgttattcatagattaccaatgccttttgttggtgatgagcttcatcattctggttggaactcttgtagttcttgccatggtgatgcttctgttgatagacgttatctcgtgttaccgtctcttatatctggtcgcatttatgcgattgatactaaggaaaacccgagggctccgtctttgtataagtatgttgatcctaaagagattgctgataagactggattggcgtttcctcacacggctcattgcctcgccacgggcgagatct

SEQ ID NO: 936 - DNA, 440 bp, Arabidopsis thaliana
agtataaccgtcctcacctcatcgagtttctttcttctgaaaatgtaattgtctccaatcttacgttcttgaatgctcctgcttattcaatctattcaatctactctagccatgtatatattcataagatattggcccattcttctcctaaatctccttatacaatcggtattgtaccagattcttctgattacgtctgcatccaaaactctaccattaacgtggggtatgacgcgatttccctcaaaagcggttgggatgaatatggaattgcctattctcgtcccactgaaaatgttcatataagaaatgtgtaccttcgaggagcttctggttcctctatctcctttggcagtgaaatgtctggtggaatatctgatgtcgtggttgataacgctcatatacactactcgttaaccggcattgcctttagaaccaca

SEQ ID NO: 937 - DNA, 440 bp, Arabidopsis thaliana
gaaaccctagattcacatttgagctgagagatgctgcgtgtagcagggaggaggcttttctctgtctcgcagagatcttcgactgcgacctccttcgtcgtctcccgtgaccataccctttccgatggtggcggcgactcctcttcagctcccagatccctcccctctgcagatctctcatcttaccaccgtagccttatcagaggcttctcttctcaagtccttgctcaaggaaatgagataggttttggttcagaagtcccagccacagtcgaagctgtcaaaacgcctaactcaaagattgtctatgatgaccataaccatgagcgttacccacctggtgaccctagcaagcgtgcattcgcctattttgtcttgtcgggtgggaggtttgtttatgcctctgtcctccgcctgcttgttttgaagcttattgtgag

SEQ ID NO: 938 - DNA, 440 bp, Arabidopsis thaliana
ccaagatgttcgtcgttgccggaaccggtgttgccaaaggagctcagaagtcctcggacttctattgcaagcatcgcaaagcctacgacggtcctcaaggactctcggagcagcagaaggagaagctggagtcgcacgacacggtgagcggcaaattggaaggctcgaccgagagtgtggtgaagggcaccggagccgtggtgctcggcgtgaagaagggcttccgattcgtcggggacaaagtgtcggacaccgccaacagcgccacgaagcccgtgaagaacaccgagtggtacaagaagaaggaggagaagaacaagaagaagaaggaggagaaagaggctaagggcgtcaagtccgaaaccggagtcttctctgccatcggcgacgttgccaagaccggttggggcgcgatcaacaccgtcaaggacggtctcgag

SEQ ID NO: 939 - DNA, 439 bp, Arabidopsis thaliana
cggccgcccgggcaggttgaatgtgagaatttggtgatttatcgttaaatccatggcggctccgtcgccgtcttcaccaccaaacctcctctctcctccaccattccgatctcccgaagcttcttactttctccgaacttgttcaaatttctctcaattgaaacaaattcacaccaaaatcatcaaacacaatctcaccaacgatcagttactagttcgtcagctcataagtgtttcttcttccttcggagaaacccaatacgcttctctcgtctttaatcaacttcattctccttctacttttacctggaaccttatgataagatctctctctgttaatcacaaacctcgtgaagctcttcttctctttatccttatgatgatctctcatcaatctcagtttgataaattcactttcccttttgttatcaaagcttgt

SEQ ID NO: 940 - DNA, 439 bp, Arabidopsis thaliana
ccgcccgggcaggtcccacttcttctcctctctctctactccaagttttcagaatgacattcttcatcgaagacactagtctcatcatcagccacgttctctacaaaacggcacttatcatcaccgttttacgatggatctttgcatggatcctccgttaccgctcaagatcatcatcatcatcatcatcatctcaatcgtcctcttctccttctatttcatcacaaaccatcaaagaaagcctagccgtgtccgctttccgcgacgcggtggagagatctcccgcggcgataaacgacatgtgtgccgtgtgtctaggagatcttgaagacgaggacgaaatcagagagcttaggaactgtactcacgtgtttcatcgtgattgtattgaccgatggctagattatgaatgttgcggcggtgatgatgataaccaccg

SEQ ID NO: 941 - DNA, 439 bp, Arabidopsis thaliana
tcgagcggccgcccgggcaggtctaattcaaatggaagattcgtctcctctgcatctcatatacgtcaccgagagaaacggtgtccctctccgttaaccttaacggccatgtcagccgccgcagctgaaaccgacgtctctctccgtcgcagatctaactctcttaacggaaaccacactaacggcgtcgccattgacggaaccctagacaacaacaaccgtcgcgtcggagatacaaacactcacatggatatatctgctaagaaaactgacaacggctacgccaatggtgtcggaggaggaggatggagaagcaaagcgtcgttcacgacgtggacggcgcgtgatatcgtctacgtggtgagataccattggataccgtgcatgttcgctgccggacttctgttcttcatgggcgtggagtacctcggccgcgacc

SEQ ID NO: 942 - DNA, 439 bp, Arabidopsis thaliana
aacaaagagattagagtacaaaatacgaatcataagagactcaatagtcaattcaataacacttaaaagaaaatcactagaaaaccccttgtttccttctacaatattggaataggatcttccatggcttcttcagcagcaaaaccaccaacacgtccagtggtaccactcaacacaaccacacttccttcggcatcaacatcaacaatcacagaatctccttctttaatgtcccttgaaagcatcttctccgccatactatcctccaaaagcctcattattgcacgtctaagtggcctcgcaccataactcgggtcgaatccttcatccaccactctctctttaaacctctcagtcacctgaagctcaatctctttgacctcaagtctcgccaccacttctttaagcattatatcagcaatctccttgacttccagct

SEQ ID NO: 943 - DNA, 439 bp, Arabidopsis thaliana
cggccgcctacttactatgattatatacgttcaaagtctgatttgtaaattacatcactcagatcattaacttgatttactgcatgatgcagactttagccgttatgaatggtttaggcttaaaccctatgcgattaccacaggttccacctccaactcatacaaggatcaatgagaccttagagcaagacctgaacctagagactcttctcgctgctcctcactcgctggaaccagctaaaacaagtcaaggaatgtgcttttccacagccactctgctttgaagataacattcagacaatgatgatgatcggaattcctctagtacatatgagatgattattacaactatcaaatgactatgtctgtgagttgcatccatccataagcacaccggtctctactacttcgagtgattgctgctgctgacttaaccgca

SEQ ID NO: 944 - DNA, 439 bp, Arabidopsis thaliana
tgctcattcctttatcatcaaactacctgatggcttcgacacacaggttggggagagaggattgcagctgtctggtgggcagaagcaaagaatagcgatagcaagagcgatgttgaagaacccggcgatacttctattagatgaggcgacgagtgcattggattctgaatcagagaagcttgtacaagaggctttggatcgtttcatgattggaaggactactctcatcattgctcatcgcctttctaccattcgaaaagctgaccttgttgctgtgctacagcaaggaagtgtctctgagattggaacgcatgatgagcttttttccaagggagaaaatggagtctatgctaagctaattaaaatgcaagaagcagctcacgaaaccgccatgagcaatgcaagaaagagtagcgcaagaccgtcgagtgctagaaac

SEQ ID NO: 945 - DNA, 439 bp, Arabidopsis thaliana
agaacagagcagaaaccgatgattatagacctaaccctaggagaagattgtttgttatagattggaaatcggaagatttgatcacaattccccttcggttatatgaacctttcatgatccgagcaatcaaatcccgcagcattcctgtggaatacatcgtgttatctgtctgtaaatacgcgaagaaatgggttttcgatacagaagaaagcctttcagggcaaaagagagaagcaattgaagtggttgagaggcttttgccatatcagagggggctaatctcttgtgaactcttattcgaatcgctaaaacattcaatctggttagaagctagctccgaatgtcaaaatggattcatgatcagaatctgcaagcagctcgacatggctaaatcaactgatctcaagattctatcccgaggttatggagaaaaagctga

SEQ ID NO: 946 - DNA, 439 bp, Arabidopsis thaliana
accttgatatttttcagagagggagagatgatttccgatcattgctatgtcgtccggatttcttcgtcaaggccgtccggtttgtcaaccggcttcagcccgacatccatatgcctcttgtgatgtggtttgtcggttactttcccggaatcttctggctcctttagcagaattgtccggtgtcgccgtcctccatcggttggttcctctaccaacggtggttggctcttgtctagcttctccgtcgtccctctccggcggtttaggctagcttttggccggatttcttttccggttttgttttatgttctcgttttctatagatccagtttgattttgctcctttgtgttctaactcttagagggctcaattccttgaacctcctttgtttaaagggctcaatttgtttttcaagcttatcgatttcaattatataag

SEQ ID NO: 947 - DNA, 439 bp, Arabidopsis thaliana
catagtgtcgatatggcttgccaaaacaatctcgttgtgaagcaaatcatcgacttgtacgaccaaatctcaaagctcaagagcttaaaaccttccaaaaatgtcgacactttgttcggacaactcgtgtccacgtgcttacccacggatacaaacatcgatgtcacaaatatgtgtgaagaagtcaaagacatgagagctaatctcatcaagctttgtggtgaagccgaaggttatttagagcaacacttctccacaattttgggatctttacaagaagaccaaaacccacttgaccatttacacatctttccttactactccaactacctcaagctaggcaagctcgagttcgatctcctgagccaacactcaagccatgtccccaccaagattgccttcgtgggttcgggtccgatgcctctcacatccatcgtat

SEQ ID NO: 948 - DNA, 439 bp, Arabidopsis thaliana
ccacgcgtccggacgagtttgaactttaggattcaaggtcacaacttagttcttgcggaatcagaaggatcatacacagttcaacaaaactatacaagcttggatattcatgttggacagtcttattctttcttggttacaatggatcaaaacgcgagctctgattactacattgtcgcgagtgctcgggttgttaacgaaaccatatggagaagagtcactggagttggaatcttgaagtataccaactctaaaggaaaagctaaaggtcagttaccccctggaccacaagacgaattcgacaaaactttctccatgaatcaagcaagatccatcagatggaatgtatcagcaagtggtgcacgtcctaacccgcaaggatcatttaaatacggttcgatcaatgtaaccgatgtctacgttctaaggaacatgccgc

SEQ ID NO: 949 - DNA, 439 bp, Arabidopsis thaliana
ccacgcgtccgctctcgatcaactttgatcatcttctttgcttacacaacaatcatattaatcggttctatcaactgtagagacaacaacaacaacaatctggtaacaaaccaatccgcttgttcgtgtttggcgattctgtgttcgatgccggaaacaacaattacatcgatactcttcccagtttccggtctaattactggccatacggccaaaccactttcaaattccctactggaagagtctccgacggtcgtacaattcctgattttattgcggagtacgcatggttaccgttgatcccagcgtatctacaaccaagtaacggtaaaaatcaatttccctacggagttagttttgcttccgccggtgccggagctttagtcggaacctttcccggaatggtgataaatttgaaatcacaattaaacaattttaa

SEQ ID NO: 950 - DNA, 439 bp, Arabidopsis thaliana
gaagagaggtcacgtcagcgccggacatggacgtatcggtaagcaccgtaagcatcccggaggtcgtggaaacgcaggaggtatgcatcaccacaggatcctcttcgacaagtaccatccaggttacttcgggaaagttggtatgaggtatttccacaagcttcgtaacaagttcttttgcccaatcgtgaacctggacaagctatggtcacttgttcctgaagacgtgaaggcgaaatcgagcaaggataatgttccgttgatcgatgtgacgcagcatggtttcttcaaggttttggggaaaggtcatttgcctgagaacaaacctttcgttgtgaaggctaagcttatctctaagactgctgagaagaagattaaggaagctggtggtgctgttgttctcactgcttagttttttttttcaattcagtctcttttt

SEQ ID NO: 951 - DNA, 439 bp, Arabidopsis thaliana
tttttttttttgatgacaaagacagtattttaattcggattttacctaataaatccatagcgaagaacggtagctcatgttcctattttatggtgtgcaccatcaatgatgatataattgtctctcgctctatacataaatcttagatcctttaacgcctccagaatcgaccttgtcccagttgtccttgctttcgcttttgatactctatggacctgtcaatgaactctttggcaatatcttttctctcaaaagaggccagaaccggtctgatgtctgctggactgttacgtgcaacatattcaaggaagggtatcaggtcaactagggctgtgtcatcagcttctagtttgtaaggcttgattggcacgctattttctggctgaagggttgattcaaaggcatttgcgctaacaaacagaatcttccggacgcgtgg

SEQ ID NO: 952 - DNA, 439 bp, Arabidopsis thaliana
  misc_feature (1)...(439): n = A,T,C or G
ctttttttttttttttttttttttttttttaccaattacgacaaatatcttaatcaacttggtccaacaccaaaacacatcggaaacgtcctttgcgttaacccaaaacttcaaaagtagtaataaagaaaataaaacaataactctcttttaggattagaaattattctaattacatagaatagatccctttttctatgctcttcccgcaatttccatcaacgaactatagccatacgacgtcgttgagcctccgttggcactttcacatcggtcgctaaaccgataatttcgaaaaaccgaacaatgtaccacgaaatgtctatttgccaccattcaagtccttgtctagccgatgactcgaacgcatgatgattgttgtgccanctctctccaaatgaaaataccgataaccaccaaacattacgagaagtgtcat

SEQ ID NO: 953 - DNA, 439 bp, Arabidopsis thaliana
atttaaaaatttggtaaaaagacatttgactaatgtttgttgcaggtaaaatttgaaactcttaaaaaataatatacaaaacataaataaacaaatgcatcttattgtatagtatgaatacctccaagatcaactaatgcaatttcacatcagggttccttatagatttaagccacatatccgccattactctagatgacaagctccacaacatctcctcttcttcttcttccttctccttcttctttatattactcttcttcttccctttctttcccattccgtgttccacaagccattgcgccgcggtaagcctccgcttctccgccgcatctttcttcactcccccaatgtgcaaacttcctacctttaaccctttctcctcctcctcttccgcttgtactgctaccacaactgtccctcctacagcctcatatct

SEQ ID NO: 954 - DNA, 439 bp, Arabidopsis thaliana
atcctctagagcggccgcccttttttttttttttttttctaaaataccagtctttattaaagaaacgtataatccttcttcttcctaaaaggggttcattaatcatacaactccttcatgtttaatgcagaaaccactcaacactcattcatattacataacccaaagaaattcatcaacattgtcatagctaaagaaagaacacacattcaacactcctctgaacattccgctaacacccctacttgctttgtgtacctagaagagaagagggtgatatattacttagatcccacgaatcatcactcatctttgatgtgttcatgatgagcagaagcagaagcagcaacaacatctccatcatcatctccaccagacttgacagtaacaataggcacaggtccatcacgatcatcaggatatctaaccacaacaacag

SEQ ID NO: 955 - DNA, 439 bp, Arabidopsis thaliana
  misc_feature (1)...(439): n = A,T,C or G
gcggccgcttttcttcttacgatttacaaatttccgatgctgtgacattaacgtctgagaacagagaaacacttcaaatctttgaattcgtagtgcgacggagnnngaggagccatcagtttcgaaaatggcgtgcgaaggtggaggatctaacgtcagnnntagctactacaccattctcgggattcgtaaagatgcctctgtttccgatatccgcactgcttatcgtaagctagctatgaaatggcatccggatagatatgctcgaaatcctggagtcgccggagaagctaaacgtcggtttcaacaaatccaggaagcctattctgttttgaatgatgagaataagaggtcaatgtacgatgttggactatatgatcctcatgaagatgatgacgatgacttctgtgatttcatgcaagagatgatctcaatgatg

SEQ ID NO: 956 - DNA, 439 bp, Arabidopsis thaliana
tttttttttttttttttaaatcacattgttcacatcataaaataactttgaaagaaaccaacaagttacattctaaacatttcgtcctttgaaaactcttaaaaacacattattaattaagcatcacagattaatcatacagtcactttacctcacaattttagcaacaaactcatcaatattcttatcagaatttcctccatcagacaaagcttcccttgcaaactccatcaatctccgagcgttttttctaatctccttccctttctccgacatatcttccataacttctccaacacatctcacaatctcttccttcggaacaaacccattttgatctgccttaaccctaaccccaaccttccacacatcttcaataaacttagcattagtcggctggtcgctataagccggcatccctatcaaagcaactcctaag

SEQ ID NO: 957 - DNA, 439 bp, Arabidopsis thaliana
  misc_feature (1)...(439): n = A,T,C or G
cccgccagattcaaatctttcttccaccatcgtcactcattgcttctcctccggtcgtaagtatttggaaccttgaagacttaaaaataacaactttttatagtgggcgctgtccaatatattggagagcttgacannntaataagatatatactctacaagcgttatacccgaagactgggtctataaatcaatgtcagaaggtgaaatggccatcattaaaccagagatgatgaaatcctatatatggcttgaaactgctgatggctcaatccaacaagtggaacaagaggttgcaatgttctgtcccatgatatgtcaagaagtaatacagaagggtgttgggtcttctaagaactacgcaatatctcttccacagcgagtcaatccagccatgttaagcctgatttttgattactgcagatttcatcaagtacct

SEQ ID NO: 958 - DNA, 439 bp, Arabidopsis thaliana
gactcggctctacagtacattttgttgagcaatctcgtatttagaggattccaatgtctggcgcagaggataataaatcttcccatgctcagctttcgtcccaaatttttcttgatcttgtggattcggtgatagctgatgtagcatctgagtgtcatcgggtagcacgactaggacttgatcgtgatttggatatagtagaagaagagttgagattgtcagtggaagcgcgtgcgaagatcgctgatcctagcaacaacctcgaaaccaacaccaaatatgttgttgatatatttgggcagactcaccctcctgtagctagtgaagtgttcaattgcatgaactgtgggcgacaaattgttgcaggaaggtttgctcctcatctggaaaaatgcatgggaaagggaagaaaggctcgtgccaagactaccagaagcac

SEQ ID NO: 959 - DNA, 438 bp, Arabidopsis thaliana
ttttttttttttttaggtagatgttttaatctttattttaaacataaaataacaataagcaagagacacaaccgcgggaaaacaacaactcaataacgaaccacttcctattccacaaccacaaattattcttctcgtattgatttttctcaatccagaggaagtttattgagcttgcggtaactgtaatccttgaaagcaaacggtttaaactttggaggattatcatctccggttagttccggtaaaggtccaacaatcttttcacggggaggctccaagaaaaccggccacgacatcctcgtcttctctttatccaccgtcgtcctatgcaacacatttttatacctcccattactcaacctcagaatctgatcgccgatgtgaacaatgacggcggagggaatatactctgcatcgaaccagtgatcatctttg

SEQ ID NO: 960 - DNA, 438 bp, Arabidopsis thaliana
taagatacctcttttaagccacaccataaccacaaccaaaaactacaggtaaaactggaacagggcatcgagatgctgaagatcttcaagaactacgacgctgacacgtcaatcttggatgatttcgggttttatgaagagcgggagaaaattatacaagaccggaaggcaagaagacagccaagcttgccatctgcaggagtagtagcaggagaaaatgaacataaacctgcttctgctgcattacccacagacttcatgaagaacatgtccaagagttttgcgcaagttgtccgcttggacgaaggcagcaaagaagcagtcaaggccagttcatctccagatgcaattacaacagcagcagtctcttctggtcaatccaactagtaagtaaaagacatcaattagcaaagactatgttttcaaattccataatat

SEQ ID NO: 961 - DNA, 438 bp, Arabidopsis thaliana
tgctcgtaccaaaatatgtcacacaaagctatgaaagatacacaaagagatgtaattgatttttacaagatgttagattattgtacaacacgatctccatcacaatcctaaacaaaattacaaaacaaataccagttttatcataatactaatctttgcacaacctttgcctttgcctttctcttcacaatcttagtaaatatatatagctgttgccaaaggacttctcggcgggaattctgatcagtacttagaagaaaccttgggttgcatttagagtgtttgtatacatatgttttagccaacagattcttactctcaaaacagagcttcccttggtgcaccgattaagttaagtgcggttgctgcgatgtgagatggcatgagtccagcttcagctagttgatcagctggtgcaccgtgatcaatgtatcgatc

SEQ ID NO: 962 - DNA, 438 bp, Arabidopsis thaliana
tatggttcacccaagtttgagcttgtttcatgctggtggcagtactctcacatctgactatggcagtgatactgcttatgaaacatctgaggttggatcaccaagtgtaggacaggatgatatttctgaaattggtacggaagatctaactctggatgaagatttaactttaacaaatccaatagagaagctcgttaactttagcatgtccaacattgacgaggggctttcaatgagcgaaacaattctagagcaacttgaagactttcccaaacataaagtccgctcaagatatgtcaataatatcctagggaaggatgtgtataatggaaatgcttcaaaaggcgtatttcttgctaacaatggttcacgacttctctctgaaccagaaccatcaactcactcagtaatgcatgacagaaatgatagtgctgaaag

SEQ ID NO: 963 - DNA, 438 bp, Arabidopsis thaliana
aaacgccgggaagctgaacaagtgaagaaatctctcaacagcatggatgtagattcggattcagaaaatgaccagccacaaaagcgtgatcatctctggtcagattcgttattcccaatacgtggacattctcagagagaaacatgcgccgcggacactgaacaatctgcatctggcaaaggatacgagagcccgacctcggactgggaacatgtcatcaaggatgattgagtagtgaaatttccttggacaagaagtttcgatcctataatgaaatcttgttattataaataaaaggtatttgtagaataacatgaacggccattatgaaaacgtttgttatgtatgataaaaggataaaactgcttggatgctgattttcataatatgatagttttaagttactgattttcaaaaaaaaaaaaaaaaaaaaaaaag

SEQ ID NO: 964 - DNA, 438 bp, Arabidopsis thaliana
cttttttttttttttttttttaaagtagagattgatcttatacagttataccaaaagttaacctttttctcttaccaatcgttcatcatcatttattatataacaagcaagcaaaagatttctaaatgatgtctgagattatcaccagcacggtagaaagcatacatgaagcagctcaaacatctctaaaaaccctgagaaacgcaactatctaatcttgtgatttactcgtttctgcttgactctgatttcattcactcggcagaattctcgtgcaacagtacgtactctcggctgctgttgccaaactttatggtgtctttctcaaaaagctcataatatctttgtggctcaatgggactttcattgatataagttttgttggtactaccaagatccattatgtaaggcttcacttgcttccccatcataccatct

SEQ ID NO: 965 - DNA, 438 bp, Arabidopsis thaliana
  misc_feature (1)...(438): n = A,T,C or G
agaaaaaacacttacaaagctgatatctttcttactacttcgaagaaatcttcttctcccttccaaaaaaacaatccctaaacccggaaccaaagatcgacattcatggctctcttcgacactcataacacatgggcctttgttttcggcttgctcggaaacctcatttcctttgctnnnttcctctctcccgtgccaactttctataggatttgtaagaagaaaaccacagaaggatttcaatctattccctatgtggtggcgctcttcagcgcgatgctttggctctactacgctactcagaagaaagatgtcttccttctcgtcaccatcaacagctttggttgcttcattgaaaccatatacatctccatctttgttgccttcgcatccaagaaagcccgaatgctaacggtgaagctcttgttgctaatgaac

SEQ ID NO: 966 - DNA, 438 bp, Arabidopsis thaliana
ctggccatttatttgatcaatcacaattcagtaaaaacaaagatacaaagatgaaaagtgaactcaaagtacagttacaacctttgtatgattcatatgaaaagttgaagtaacaaagcaaacatagtatccttctcttagtagttaccaaaaaccattgagccaataaggcgtctcctctaggtaggccctttcactccgggtaagatagcattgtgatgagtgactcgtgttgcggaaaccttgataagagatcagagcgtttcgcgagctcaaagtcctcgaactggaaagcaggagcgcaggtgcagccaacaagagagaaatggttctcagagtctctagcctcagctttaagcagagccccgtcttgagaaaaatgaacatcctttgtaggaaacgaaccaaaccagacgtttggagggaccgtgtactgag

SEQ ID NO: 967 - DNA, 438 bp, Arabidopsis thaliana
  misc_feature (1)...(438): n = A,T,C or G
tgttattacaactaaccccaagataaaaaaaaatacaagggggctttttgtttggaagttacactattcccctgtacattatatatatcatgttagtaaaataaatatannangattaaataatggtgggaagactaagaaagtaaataacaaatttaagcaggaaattaatattacaatgtaattattacctgttgttttatctttcttttttcactaaagagaatttttacccaccatcaaaactttttttttcacttttcttccaaaccttctttttcaattcaaggatttgctcttgaatttccttattcccttcaaatcaaccactaccacacttatattgtctttgcttcctttttgcaaagccatcttcgacaaatactctgccgcggacattgctgcaggatcttttccttctcctcttttctccgccgg

SEQ ID NO: 968 - DNA, 438 bp, Arabidopsis thaliana
agcaatcccgttggagttcatcagatcagagaaagaacaaccagcgatcacaacattccgaggtccaacgccggcgattcccgtcgtcgatctaagcgatcccgacgaagaaagcgtgaggcgtgcggtggtgaaagcgagtgaagaatgggggctattccaagtggttaaccacgggattccgacggagctgatacgacgtttacaagacgtcggaagaaaattcttcgagcttccttcgtcggagaaagaatccgtcgctaaaccggaagattcgaaagacattgaaggatacggaacaaagcttcagaaagatccagaaggtaaaaaagcttgggtcgatcatctcttccatcgaatctggccaccgtcatgcgtcaattacagattctggcctaagaatccacctgaatacagggaggtgaatgaagagtatgc

SEQ ID NO: 969 - DNA, 438 bp, Arabidopsis thaliana
atctgcagtttgggaaaccagtcaaattccgaagaatctgaaatgcactttgtccgtcttttggacgaccagactttcgagtttatgtcaacttaccccttggattcctttgaatatggttgttcaattctgagctgctcattcaccgaagataaaaatgtctattactgcgttggaaccgcatatgttttaccggaggaaaatgaaccaactaagggaaggatattagtatttatagtcgaagatgggaggttgcagctaatcgccgagaaagaaaccaaaggagctgtttattctctcaatgcctttaatggaaaacttcttgctgctattaatcagaagattcagttgtacaagtggatgctgagggatgatggcactcgtgaactgcagtctgaatgcggacatcacggacacattctagctctctatgtgcag

SEQ ID NO: 970 - DNA, 438 bp, Arabidopsis thaliana
  misc_feature (1)...(438): n = A,T,C or G
gcacttcatccgcctcgtacaaagaagaatggaaaggcagcgtcgtgaggaggagctaaaaggtcgttcctctaaaaagggacaagatgcagagcagtctctcttaaacagggctactagtcctcagccagatgggccatcatcaactggtggtagcttaaaatctttgagagacaaattaatgccnnnnnataaagataaagataaagaaaaagagactccggaggtgtctggtctgaagactgctggacctgagggagagataactgcagggtacttaatgaagaaaagtgcaaagacaaatgggtggagtaggcgatggtttgttctgaatgaaaaaactggaaagcttggttatacaaaaaaacaagaagaaagaaacttccgcggcactgtaactttggaggaatgcagtatcgaagaaatttctgatgatga

SEQ ID NO: 971 - DNA, 438 bp, Arabidopsis thaliana
actggtggagctttttatatgcatgatgataggtttcaggaaatgtctgctggcggaaacaggcgaatgcgtggtgggagaagacagtggggctctggagaggaaagaaaatggggacatgacaaatttgaagagatgaatactggggaaaaacattctgataggatgtctagaggccgattcagaggtcatggtcggggtaggggacaagggcgtggatacgctagagggagcagttctaacacattaaccagtagtggacagcaaatttatgttcctaaagctgtctcacgagggagaggacccaggaaatccgacactcccctgaggaatgaaaatcaagcacattctgagcaaagcaaacagttacgaaattctaatgggtctcaaaactctcgtgagaaaatgccacacctcgattcacggcgttcaccaact

SEQ ID NO: 972 - DNA, 438 bp, Arabidopsis thaliana
atggacatgatgctgcctgagtttctagattgcacggcaagaactggtttagacatgctggctaagcattactaccaatcatctaaagcatgggtggttttctttgttcctggaagtgatgctgatatcgtgttttatgatgagtttatgcattatctggaggagaagcaacgggcagctgtttctaaattggatgacacaacaacgttgtttctggtgcctccatctgatttctccgagaaagtacttaaagttcctgggaaactaagcatctctggagttattctacgtttagaatgtggtggttctggctccggtgggcctgttcaacagcaaggtgagagaaaagatacagacttgctaacttattatggtgaaacatcatattcagaagctagtggagcgtttcctgatgtgggaaacccacgtattccgggt

SEQ ID NO: 973 - DNA, 438 bp, Arabidopsis thaliana
  misc_feature (1)...(438): n = A,T,C or G
tccacctaaaggaaaaccaattgaaaagtctggacctgagtttttagttgaacaagcaaagctttgccctggtgaaatcacggttgtngctttgggaccactaacaaatctcgcgttggctgttcagcttgatccagagttttcgaaaaatgtcggacaaattgttcttcttggtggagcanntgcagtaaacggaaatgtaaatccagcttcggaagctaatatttttggcgatcccgaagctgcagatattnnnttcacatgtggggccgatataattgctgtgggaatcaatgtgacccatcaagttattatgacagctgatgacaaggacaaactagcatcatcgaaggggaaattagctcaatatctctgtaaaatccttgatgtgtactatgattatcatctcacggcttacgaaatcaaaggtgtgtacct

SEQ ID NO: 974 - DNA, 437 bp, Arabidopsis thaliana
tttttttttttttttgattaaacaatttatcatttccacaaggatttgaatacaatatgtacttgcaggaaaaaagagttgcatccactcacgggatcaaacatattctacaaaaccattgggaaacaaaaatgatgtaattgagaagtaacatttttcagatgtttaaattattgtttgtgaacttctcagcaggtttccagcaagaaaaagcatagatgactcttcctttccatccttgaagcatccaattgttatcgctatcgatcacaaaatctctatggtaacgtttcctcacaatttccttagcctccttcatgatctgtttgctaatagttgctggcttaaacccggctctcaaaatcctaactcgccattgcttgtaggtttcaggcctcgcaaaccgctctgcaccctcgcaggaaatcacgctcatc

SEQ ID NO: 975 - DNA, 437 bp, Arabidopsis thaliana
ctttttttttttttttttttttttttttaaagtaaccaatattttccttagaaatggtagatctcaatgtcacaatactcacttttggttttggttaaaccatctttagtcaaaagacatgaggaaacatatggaaccatcagaaaaaaccatagtatataagccaacaaaaaacggtgttcttttttttgtcccattttatttgtagaaacagcaaaaaaatgtatggtcgctagtttagccgaggcgggtcactgcagcatgcatagcatcggcaaggtgaggcactgtcttcgaacttagacctgccatgcttattctcccatcagaggtcatgtaaatgtggaactctttggtcatgaattcaacttgctccttgttcaatccagtaaatgtaaacatcccaatctgtttgataatatgactccagtcaccag

SEQ ID NO: 976 - DNA, 437 bp, Arabidopsis thaliana
tcgagcggccgcccgggcaggtactggatttcgttaaaatcaaagccaaggagagagctgaagctgcatctttgttttcatccaaagaagcagaagaggaagttaaaaaggtttctcgggaggaggttaaaaaagtgtcagaaactgcagaaaatccagagactccgaaagtggtggcgccaacagcggagcaaatattagctatcaaggctgcaattatcaattctcagacgatagaagaaattgctagactcgaacaggctttgaagtttggacaggttcctgctgacctgataattcctgatccggccacaaatgactctgctcccatggaggaatagaatgtgtgactgttgcccctccaatcgttgtagctactgctcgagaatgctcacagcaattgttttctctggcaatcctgtacctcggccgcgacc

SEQ ID NO: 977 - DNA, 437 bp, Arabidopsis thaliana
  misc_feature (1)...(437): n = A,T,C or G
ccaacaaacgcaaatacgaagaaccaaccgctcctcctccatcaactcgcagacctaccggcttctcnnnnggtccgatcccatctgcttcagttgatcccaccgcacctaccggtcttccaccttcttcttacaacagcgttcctcctccgatggatgaaatccagattgctaaacaaaaagcacaagaaatcgctgctcgtcttcttaatagcgctgatgctaaacgtcctcgtgttgacaatggtgcttcttatgattatggtgacaacaaaggatttagctcatatccctctgagggtaagcagatgtcagggacggttccgtcttcgataccggtttcgtatggtagctttcaaggaactactaagaagattgatattccgaatatgagagttggtgttatcattggtaaaggtggagagactattaagtat

SEQ ID NO: 978 - DNA, 437 bp, Arabidopsis thaliana
ctctgcagagagcatttcatatggcctgcagacgttgcatgatattcagaacgaaaacaagagtttaaagaagtctctcaaggatgttgttactgagaacgaatttgagaaaaaactgttgtcggatgtcattccacctagcgatataggtgtttcctttgatgatattggagctctggaaaatgtgaaagaaacgttgaaggagttggtgatgcttcctcttcagagaccggaattgtttgacaaaggccagctcacaaagcctacgaaaggtatactgttgtttggacctcctggtactggaaagacgatgctggcaaaagcagtagcaactgaggctggcgcaaatttcatcaatatctcaatgtccagcattacttcgaagtggtttggtgagggagagaagtacgttaaagctgtcttctccttagcgagca

SEQ ID NO: 979 - DNA, 437 bp, Arabidopsis thaliana
gctcctagtttggtggggaagctagagacagaagtggagatcaaagcttcggctggacagtttcatcacatgtttgccgggaagccacaccatgtctccaaagcaagtccaggcaacattcagagctgtgatctgcacgaaggcgactggggcactgtcggctctatcgtcttctggaattacgttcacgatggggaggcaaaggtggcgaaggagagaatcgaggcggtggagccggagaagaacttgatcacgtttagggttatagaaggtgatctgatgaaagagtacaagagctttttgatcacgatccaggtgacccctaagcatggagggcctggaagtattgtgcattggcaccttgagtatgagaaaatcagcgacgaggtagctcatcccgaaactctcctccaattctgtgttgaggtctcccaaga

SEQ ID NO: 980 - DNA, 437 bp, Arabidopsis thaliana
  misc_feature (1)...(437): n = A,T,C or G
ccacgcgtccggggaaagagaaaacagtcttctcttctccgatcccaaaaacgcaggaaaacaatgtcgtttaacagctcccacctccttcctccacaagaagaccttcctctccgacacttcaccgatcaatcacagcaacctccgccgcagcgtcacttctctgaaacaccttcgcttgtcaccgccagtttcctcaaccnncctaccacccttaccactgcggattccgatctcgctcctccgcaccgcaacggagacaattccgttgctgatacaaacccacgctggctctcctttcattcggagatgcaaaatactggnnnagtacgttctgaagttatcgacggagtcaacgccgatggtgaaacgatactcggcgttgtaggaggtgaagattggcggagtgctagctataaggcggcgattttaagaca

SEQ ID NO: 981 - DNA, 437 bp, Arabidopsis thaliana
ggtccctctgaggtacacgcctagaaagtttgttctccatcccaagcggaagttgttggttattatcgagagtgaccagggagcattcaccgcagaagagcgtgaagctgcaagaaaggagtgcttcgaggctggtggagtgggagaaaatggcaatggcaatgcagatcagatggagaatggtgcggatgatgaagataaggaagacccgctttctgatgagcagtacggttatccaaaagcagagtctgaaaagtgggtctcttgcatcagagttcttgatcccaagacagctacgacaacttgtctcctggaacttcaggacaacgaagctgcatacagtgtctgtacggtgaatttccatgataaagagtatggtacactgttggctgttggtacggtcaaagggatgcagttctggcccaagaagaatctag

SEQ ID NO: 982 - DNA, 437 bp, Arabidopsis thaliana
ttttgatctaaatgtcaataaccaatggttgttatatacaaacccaaatctgagactatagaaagatgaaaaaccaactaaaaacacataaatattatatacaaagtggacataaatagatgaaatttgtttgaaagaaattgctatgtgcataacaagaaacagagagaatgtaatgttcaccgaggaagaggagcataagggacaagatttggatcagaagtaacgagaggcaacttgtcaatgtatatcaacaacctcttcagattctccttgtaaatcgctggtaaatctgcaatctcggcgctacaagtgtatatccatagatcaccagaattcactcttttcaagctgcctcgacagaacgggcacgactgtgaccgtgcacgccagtttctgtagcagtttatacacatggagtgattgcacgtaggaag

SEQ ID NO: 983 - DNA, 437 bp, Arabidopsis thaliana
ccctttttttttttttttcgtaagaacagagaatgtataagccaaaaattgtatgtgttcagtgaacaagaacaaaacaaccatttagaaggtaaaacacttcaggagacagatactctagagacctcagaaaaaaagtaatgaaatctagaaaacaagctcatggggcttcattccttgtttcaatgaaaaccttgcgccaaggtaagtcttcaactctggaactgcttcaatggctttgatcaaagctgcatccacagctttctggtcatctttcttcacctgtgggatctccttcttctcctctttctcagcctcaaagaactctccttctgtcttcttctttttcttctcagcaaccttgccaaagtacttatcatcgaatttatcgagggtgactccagaaatgtcaacctttgtggaagtgccaatcacat

SEQ ID NO: 984 - DNA, 437 bp, Arabidopsis thaliana
aaggttgtagacccgttgcacttggatcagctagttcccaaacgcatattatatccgagcaacaaaggggtagtggcttttacagtagaccgtcacctcttgtagtttcagggcaatatcaagatgtgtctttaatagtctccccacgtacaccatttttcaatggagagaacctattttctccaaggattcctaatggtgatgctcaaggttcttctccatccggcttaggggcaaccacattatccagaagaaggacgcttcacagacacatacaaaatattatcaacggtgatagacttattaatatgggtgctagaactggtggaacatcgagtgatggtttcgtgactacacaaataggtcatggcagaacaatcgacccatctcagcctgtagcgagccaagaaacagggatatcgttgtatgcaatctct

SEQ ID NO: 985 - DNA, 437 bp, Arabidopsis thaliana
  misc_feature (1)...(437): n = A,T,C or G
tcgagcggccgcccgggcaggtgagagagtgatgaggattcaagcaatgctttagcagttagatacacaaaccctgtatccattagaagcagnnntnnagtctatttggggtgggcatcgcgaatttctgtctgttgtgcgttctggcagaggtgttcatggtcatacccgccacgcaatagcccgaatgaggggtgggagaactcgtcggcacctggagtcttttaattttgattctgaaattccagcggatctgccagtaacctcatcttcccatgagctgaaaaagaaaagcaccgaagttcttattgctgaaattttaaacaagctgaattgtacactacgtttttttttcacatcccttgtgaaaggatttacctctgctaatcgtcgcaggattgatgggccatcattgagttcagcatctaagactcttg

SEQ ID NO: 986 - DNA, 437 bp, Arabidopsis thaliana
ttatttgaaagatactattacatcagtatgatggttaaaatgaagaaacttgaagcactacatatgacgacatcaacgttcttttcctgacaacattttcttttatcatccctaactttttttgggatgctttcacctacacactcaatgactcaaaccaaaccacacaagaacacttcccactacttatggctcatgatgggctttggtttagcctaaacccaatcaagataacttaaatagaaaacatcatcactagggatgttagtttttttatcaaaaccggttccaagagaatgcaacgggacttctcacttcgtgctgcggattgctccaagtgatggaaccaaactcagccttgttcgtcatactcactcctttcttgctaacaaacgtgactgtgtacctcttcttctctcccacgcttttaaacgaaa

SEQ ID NO: 987 - DNA, 437 bp, Arabidopsis thaliana
gcggccgctacacttccaagcacacatttcaggattaagatataatgtttcgcagactacattcccaaccagaagaatatttaagtatacaatttttgccttggggacacttgaaacttgaatagattgttcccattattccccccatgaattatgaatgctactcatattagtggcttaaacatagtaaatcatgccaacttcaatgaggctgatgtgaggaatgttgagtgctacggctggccctctgcagttcttcctcaagaaagaataaccgatgtctatcgccatcttcttcaaccaagacgaggatttcctcgatttcacatacgagtggcccattatatatgcaacacccgcctctttcgcccgtatcagatccattagctcttccctcactgaggaccccatcccaccacttgacgccgttaactgga

SEQ ID NO: 988 - DNA, 437 bp, Arabidopsis thaliana
  misc_feature (1)...(437): n = A,T,C or G
ttacaaacacacgcaagtacatcatcatcatattatcattctggtttttttttttttaaactagtgagacataagnnnaatagtcccagaaacagggggaccaatccgaaagggcagaaaaagaaagaaaagaatgtgttttatggttcgttcaataacaatcctggaaaccaaacaggtttctaatacctgtaagatgatccagactgtggcggagntggtgggagccggtttggtgtggtgcgacgggagctgccaccagatccagaagaatcctcaccattctgtgctggatcactgtaacgacggctatggccgccagntccatatctcttcaatgagtcaggtccactagcagctgcgttaaacgcattcatccagtcctctcctgatgaccctccattggttctcgggctgctttcagtgccactattgtc

SEQ ID NO: 989 - DNA, 437 bp, Arabidopsis thaliana
cttttttttttttttttttatcacaagttttgtttgtttctttttttcattatatgccttcaattttgttctgctaatgatagatatttcatggtaatgtctaaacttgaaatgatggatttctataacaaagagcagttttgttggtttccttgactgtatcaactagaaacaaacttttaaacacataaattatgtcgattgataaatgttttacccgtcgtcagtgtcccttggaccgttcacccttgagcgctttccgtctggcagccgatctaattgtctcgattagaggagcgtcctcgtcgagcttatcttctctgtctgacccgccactaatagactcatcctcatcgcttccactttgctcatcaaacagtctctttcgctctgtttccggacgttttcttggccgtcccctgcgtcttacatttgct

SEQ ID NO: 990 - DNA, 437 bp, Arabidopsis thaliana
tctagagcggccgccctttttttttttttttttttttgagaagaaaaatatcctttgatctataaacttttgatgatttattcggaacacgccacacaaccaaaacaagctttgatcaaaatcacaaacaactcagatatgtctatagtcagcataaaagtcttgagaaatataccagaactgggcggaaggtgtgagcgctgtagcatgacgtgagggccaaggataaagattgcgaaaaggaagaatccaccagatataatgctaatggtgactaaaagccatttcacatgggcaattgcagtgatcacgccaaaaaggaatgccacgggcatgcatagtaatgaaaaaagtagtaagggcaaggccacatgtaaggatttgaggatgagtgctagatcacccaactgcgcccaaataagagtacatattgttgc

SEQ ID NO: 991 - DNA, 437 bp, Arabidopsis thaliana
caatagggagctttagagagttatttggtttttttgatggtacttacattggctaaacaacagaagcaaagaagaaacaacatctaccctttagccaaacatcactagaagaactaaacttagcaagccacaaatggttaaacaagttgatgtaccgtacatacaggatttgttaagagtcagggcttttctttagctgatgcagttaagatcagtgtttctggattctttggattgaaacttgcaagccttcttcattctctttgcagcttggacaaaccccacaataacctgaagctcatccatttgctgagacatgaagtgcctttgaacaatgtcaattagttgctcctttgatggatttggaattgcatccacaaggttaaaatgtcgccaataattcagtaaagcaggcatttccaatttgctaagatcaa

SEQ ID NO: 992 - DNA, 437 bp, Arabidopsis thaliana
  misc_feature (1)...(437): n = A,T,C or G
gccctttttttttttttttttcagaataaaatttgtctttcattgtgaggactctgtttctattttctgtcatacttcatcataataacagaacatatcttaaaactcggaagaacaaataaaacccaaccaaaaagactctactaagaaactgatacttacatgcataatttgtatcgatgtttcacacaggaatattgacctttttgaatgagtttgagacggttcttgggctctctctatgcttctctcagacggtgtaagcttgttgaatggtttcaatgtcgagaccttttagtctgacaacagattcaacatgacccttaagtgtgtgaagctcccgcaacctggcgatctcgnnncttctcttagcttcttcgnnnatttgggaaagctcgttgaaatgggttcgctctgggaacatcttagcatctggt

SEQ ID NO: 993 - DNA, 437 bp, Arabidopsis thaliana
ttttttttttttgcttcttaattcttagaccattttatcatttccctcatctcaaacatttttacagatattgagcattatacatatccacaagaagcaaacaaaaaggatttagccaagttgagggatggatgtaaccaaaaaaagaaagatggaaactgtgaggagacttaagcattttcgttttccaatatctctgctgcgtcttcaactgcaggttgtggttttgtggatggaggcaaacagcgttttgagaagaatgtagatatcgttttcggtaatctcttaccgcctttatctggtgacggtgataatccaagctttgtcaatacttctttctttacctgccaacgactatcctcgaaatctgatatctcacgcactttttgtctaagcttggtctttggaacatcagggaacttctgctgtaatgtttc

SEQ ID NO: 994 - DNA, 437 bp, Arabidopsis thaliana
  misc_feature (1)...(437): n = A,T,C or G
actactccttcttcttcttccttcttcttctcttcctctcttctctactcaacatgcgtgagattgttcacattcagggtggtcagtgtggtaaccagatcggtgccaagttctgggaggtgatctgtgacgagcacggtnnnnnccctaccggcacctaccgcggtgactctgaccttcagctggagcgcatcaacgtgtacttcaacgaggccaccggtggtcgctatgtccctcgcgccatcctcatggacctggagccgggcaccatggactcggtcagggctggtcccttcggtcagatcttccgccctgacaacttcgtgttcggccagtccggtgcaggcaacaactgggccaagggccactacaccgagggcgctgagctcatcgactccgtcctcgatgtggtgaggaaggaggccgagtcctgactg

SEQ ID NO: 995 - DNA, 437 bp, Arabidopsis thaliana
  misc_feature (1)...(437): n = A,T,C or G
aacttctctgtaccggaagaggaagaagacgacgacgaacatacgcaaccaccgaggaatattactcgccggaaaactggattacggccaacagactccttcggtctctttaataccgacgaccttggagtggttgaagaagaggatttggaatggatttcaaacaaaaatgcttttccggtgattgaaacattcgtcggtgtattaccgtcggagcattttcctataacgtctcttctggaaagagaagcgactgaggtaaaacagctgagtccggtttcagtacttgagacgagtagccatagctccacaacgactacctcaaacagtagcggcggaagtaacggaagcacgncnnnggctacgaccaccaccactccaacaataatgagctgttgcgttggttttaaagcgccggctaaagcgagaagcaagcg

SEQ ID NO: 996 - DNA, 437 bp, Arabidopsis thaliana
  misc_feature (1)...(437): n = A,T,C or G
ttggtagtgatgacgttaaaatctctaaggctgatgagttttcgggtctagatgaggttagcgatatttccttctgcgtaggttcagagaaggctaagtgtgttaggtcgagaatcgcagcgctttcgcgtccttttgaggccatgttgtatggttctttcgtggaatcaacaacttctgagattgatttctcggaaaatggcatctctattgaggcaatgttggcactcaacatatatagtagaatcaaaagagttgatctgtttcgtgtggaaactgtatttgagctgcttcaattagccagcaaattctgttgcgatgatctgaagtctgaatgtgaggctcgctnggctgcttctgtcactgaccttgataaagctntaacctttgtagagtacgcgttggaggaacgcacaacgcttctcttatctgcttgc

SEQ ID NO: 997 - DNA, 437 bp, Arabidopsis thaliana
atttgaatttcgaaatcgttcttacaaaggcgtcgttgtgacgttgcttctgtctgcttcaatctcttctcttcttctcataccaattccaagacctgaaacagtcctagccaaattcctctccatctctcccactcccaatctcatctgctcatgacgacgagccagtcttctcaacgcgtttctgattccaagccaatcatcttccacatcatcaccatctgcagcaatcgtagccagatccgataatctgattctcatctcagcctctgagccaccgattcccaccttcgccgtcgtagggagctcaaatctacaaagcggacacgagttatgatccgagagccaagggacgatgcaatcggagtggtatatatgactacacggtaatctccgagcagattctccgatgatgaaatcctctttgcaaacggcgc

SEQ ID NO: 998 - DNA, 437 bp, Arabidopsis thaliana
cttaaacagtaataaagtagtatttcaacaggctgctaataagattgctccctttcgcttacacagtgcttaacaagatggctggtgtaaagcgaaaattaagtaccgagtcagatgttcatgctcttcacaaagaactggatgaggtttcatgtcctgtttgcatggatcacccacataatgctgttctactgctgtgcagctctcatgacaaaggttgcaggtcctacatctgtgataccagttaccgacattccaattgccttgaccggtttaagaaattgcattctgaatccgcaaatgaccctactcccgaggcgaacttggcttcaagggaacataataacgaatctctatacgagcatggtacagccagtcgaagcagttttcaccgtgagtctggaaaccgaggctcttcttgggattccgaatcactg

SEQ ID NO: 999 - DNA, 437 bp, Arabidopsis thaliana
tggagctccatcctcctctgaacagcctaagcctgtggtggtgaccaccagtggtcccaaggttacgccgcttcagcagaaaaaagcagacactcttgagcggttgaaggagactcttcgtaaaaaacaggaaatgctggagcagaagcgtaacgagtaccgcaaaaaattggctacacttgaaaaacaaggtactgttgtcaagagggaggaagcagatgagccagatgctaagcgtgttaaactagacacagcctctgattcgggagctgcaattgcatcaccaaaaacagagtcatcgacagataagaaagtgcctatcctgaaaccactttccaccgccaaactaagcacagaaacgccatcacccgattcaaaaaactttaagcaaagaccatattcgtttaccacaagtttgaacgctcctatggtaaata

What is claimed is:

1. A nucleic acid comprising a sequence capable of hybridizing under stringent conditions to a sequence set forth in SEQ ID NO:1 to 999, or a fragment thereof.

2. A vector comprising the nucleic acid of claim 1.

3. The vector of claim 2, wherein said vector comprises regulatory elements for expression, operably linked to said sequence.

4. A polypeptide encoded by the nucleic acid of claim 1.

5. A nucleic acid comprising: an ATG start codon; an optional intervening sequence; a coding sequence capable of hybridizing under stringent conditions as set forth in SEQ ID NO:1 to 999; and an optional terminal sequence, wherein at least one of said optional sequences is present, and wherein:
ATG is a start codon;
said intervening sequence comprises one or more codons in-frame with said coding sequence, and is free of in-frame stop codons; and
said terminal sequence comprises one or more codons in-frame with said coding sequence, and a terminal stop codon.

6. The nucleic acid of claim 5, wherein said nucleic acid is expressed in Arabidopsis thaliana.

7. The nucleic acid of claim 5, wherein said nucleic acid encodes a plant protein.

8. The nucleic acid of claim 7, wherein said plant is a dicot.

9. The nucleic acid of claim 8, wherein said dicot is Arabidopsis thaliana.

10. The nucleic acid of claim 7, wherein said plant protein is a naturally occurring plant protein.

11. The nucleic acid of claim 7, wherein said plant protein is a genetically modified plant protein.

12. The nucleic acid of claim 5, wherein said nucleic acid encodes a fusion protein comprising an Arabidopsis thaliana protein and a fusion partner.

13. The nucleic acid of claim 5, wherein said nucleic acid encodes a fusion protein comprising a plant protein and a fusion partner.

14. A transgenic plant comprising an exogenous nucleic acid, wherein said nucleic acid comprises transcription regulatory sequences operably linked to a sequence capable of hybridizing under stringent conditions to a sequence set forth in SEQ ID NO:1 to 999 or a fragment thereof, wherein said sequence is expressed in cells of said plant.

15. The transgenic plant of claim 14, wherein said plant is regenerated from transformed embryogenic tissue.

16. The transgenic plant of claim 14, wherein said plant is a progeny of one or more subsequent generations from transformed embryogenic tissue.

17. The transgenic plant of claim 14, wherein said sequence capable of hybridizing under stringent conditions to a sequence set forth in SEQ ID NO:1 to 999 encodes a plant protein.

18. The transgenic plant of claim 14, wherein said plant protein is a naturally occurring plant protein.

19. The transgenic plant of claim 14, wherein said plant protein is a genetically altered plant protein.

20. The transgenic plant of claim 14, wherein said sequence expressed in cells of said plant is an anti-sense sequence.

21. The transgenic plant of claim 14, wherein said sequence expressed in cells of said plant is a sense sequence.

22. The transgenic plant of claim 14, wherein said sequence is selectively expressed in specific tissues of said plant.

23. The transgenic plant of claim 14, wherein said specific tissue is selected from the group consisting of leaves, stems, roots, flowers, tissues, epicotyls, meristems, hypocotyls, cotyledons, pollen, ovaries, cells, and protoplasts.

24. A genetically modified cell, comprising an exogenous nucleic acid, wherein said nucleic acid comprises transcription regulatory sequences operably linked to a sequence capable of hybridizing under stringent conditions to a sequence set forth in SEQ ID NO:1 to 999, wherein said sequence is expressed in cells of said plant.

25. A method of screening a candidate agent for its biological effect; the method comprising:
combining said candidate agent with one of:
a genetically modified cell according to claim 24, a transgenic plant according to claim 14, or a polypeptide according to claim 4; and
determining the effect of said candidate agent on said plant, cell or polypeptide.

26. A nucleic acid array comprising at least one nucleic acid as set forth in SEQ ID NO:1-999 stably bound to a solid support.

27. An array comprising at least one polypeptide encoded by a nucleic acid as set forth in SEQ ID NO:1-999, stably bound to a solid support.
